(19) United States
(12) Patent Application Publication
(10) Pub. No.: US 2024/0093318 A1
(43) Pub. Date: Mar. 21, 2024

(54) METHOD FOR DIAGNOSING RESPIRATORY PATHOGENS AND PREDICTING COVID-19 RELATED OUTCOMES

(71) Applicants: THE REGENTS OF THE UNIVERSITY OF COLORADO, A BODY CORPORATE, Denver, CO (US); ILLUMINA SOFTWARE, INC., SAN DIEGO, CA (US)

(72) Inventors: KATHLEEN BARNES, ENGLEWOOD, CO (US); IVANA YANG, ENGLEWOOD, CO (US); CHRISTOPHER GIGNOUX, CASTLE ROCK, CO (US); RASIKA MATHIAS, AURORA, CO (US); PAUL NORMAN, AURORA, CO (US); ALEM TAYE, SAN DIEGO, CA (US); RISHI PORECHA, SAN DIEGO, CA (US); BRET BARNES, SAN DIEGO, CA (US); BRETT PETERSON, BOULDER, CO (US)

(21) Appl. No.: 18/002,979

(22) PCT Filed: Jun. 23, 2021
(86) PCT No.: PCT/US2021/038763

§ 371 Date: Dec. 22, 2022

Related U.S. Application Data
(60) Provisional application No. 63/042,669, filed on Jun. 23, 2020.

(51) Int. Cl. C12Q 1/70; C12Q 1/6858

(52) U.S. Cl. CPC C12Q 1/701; C12Q 1/6858; C12Q 2600/118; C12Q 2600/154

(57) ABSTRACT

Provided by the inventive concept is a DNA methylation-based platform, and machine learning algorithms, for diagnosing respiratory pathogens including SARS-CoV-2 and predicting COVID-19 related outcomes, and methods of using the same, such as in identifying the presence of a viral infection, such as a SARS-CoV-2 infection, determining whether a subject has COVID-19, and/or whether a subject with COVID-19 is likely to develop acute respiratory distress syndrome or multisystem inflammatory syndrome in children.

### CROSS-REFERENCE TO RELATED APPLICATIONS

[0001] This application is a U.S.C. § 371 national phase application of PCT International Application No. PCT/US2021/038763, filed Jun. 23, 2021, which claims the benefit of U.S. Provisional Application Ser. No. 63/042,669, filed Jun. 23, 2020, the disclosures of each of which are incorporated herein by reference in their entireties.

### STATEMENT REGARDING ELECTRONIC FILING OF A SEQUENCE LISTING

[0002] This application includes a Sequence Listing which has been submitted electronically in ASCII text format. The ASCII copy, entitled 151077-00042US_ST25.txt, is 1,783,871 bytes in size, and was created on May 19, 2023, is provided in lieu of a paper copy. The Sequence Listing is incorporated herein by reference in its entirety into the specification for its disclosures.

### FIELD

[0003] The present inventive concept is related to a DNA methylation-based platform, methods to use the platform, and to diagnose and treat respiratory pathogens including SARS-CoV-2 and predict COVID-19 related complications and outcomes.

### SUMMARY

[0004] According to an aspect of the inventive concept, provided is a method of assaying for presence of a viral infection in a subject including: obtaining a methylation pattern for a set of DNA methylation sites from a sample derived from the subject; and analyzing the methylation pattern for the set of DNA methylation sites with an infection positive methylation classifier and/or an infection negative methylation classifier, wherein presence of a viral infection in the subject is indicated when a score derived from the infection positive classifier exceeds a cutoff and/or threshold value indicating the presence of a viral infection.

[0005] According to another aspect of the inventive concept, provided is a method for determining likelihood of a viral infection producing acute respiratory distress syndrome in a subject including: obtaining a methylation pattern for a set of DNA methylation sites from a sample derived from the subject; and analyzing the methylation pattern for the set of DNA methylation sites with an acute respiratory distress syndrome positive methylation classifier and/or an acute respiratory distress syndrome negative methylation classifier, wherein likelihood the subject will exhibit acute respiratory distress syndrome is indicated when a score derived from the acute respiratory distress syndrome positive classifier exceeds a cutoff and/or threshold value indicating likelihood of a viral infection producing acute respiratory distress syndrome.

[0006] According to another aspect of the invention, provided is a method of determining the nature of a viral infection in a subject including: obtaining a methylation pattern for a set of DNA methylation sites from a sample derived from the subject; and analyzing the methylation pattern for the set of DNA methylation sites with a SARS-CoV-2 positive methylation classifier and/or a SARS-CoV-2 negative methylation classifier, wherein presence of a SARS-CoV-2 infection in the subject is indicated when a score derived from the SARS-CoV-2 positive methylation classifier exceeds a cutoff and/or threshold value indicating presence of a SARS-CoV-2 infection.

[0007] According to another aspect of the inventive concept, provided is a method of treating COVID-19 in a subject including: obtaining a methylation pattern for a set of DNA methylation sites from a sample derived from the subject suspected of having COVID-19; analyzing the methylation pattern for the set of DNA methylation sites with a SARS-CoV-2 positive methylation classifier and/or a SARS-CoV-2 negative methylation classifier, wherein presence of a SARS-CoV-2 infection in the subject is indicated when a score derived from the SARS-CoV-2 positive methylation classifier exceeds a cutoff and/or threshold value indicating presence of a SARS-CoV-2 infection; and treating the subject for COVID-19 if the presence of a SARS-CoV-2 infection in the subject is indicated.

[0008] According to another aspect of the inventive concept, provided is a method of treating acute respiratory distress syndrome (ARDS) in a subject suspected of having COVID-19 including: obtaining a methylation pattern for a set of DNA methylation sites in a sample derived from the subject; analyzing the methylation pattern for the set of DNA methylation sites to an ARDS positive methylation classifier and/or an ARDS negative methylation classifier, wherein likelihood the subject will exhibit acute respiratory distress syndrome is indicated when a score derived from the ARDS positive classifier exceeds a cutoff and/or threshold value indicating likelihood of a COVID-19 infection producing ARDS; and treating the subject for ARDS.

[0009] According to another aspect of the inventive concept, provided is a method of treating multisystem inflammatory syndrome in adults (MIS-A) or multisystem inflammatory syndrome in children (MIS-C) in a subject suspected of having COVID-19 including: obtaining a methylation pattern for a set of DNA methylation sites in a sample derived from the subject; analyzing the methylation pattern for the set of DNA methylation sites to an MIS-A or an MIS-C positive methylation classifier, and/or an MIS-A or an MIS-C negative methylation classifier, wherein likelihood the subject will exhibit MIS-A or MIS-C is indicated when a score derived from the MIS-C positive classifier exceeds a cutoff and/or threshold value indicating likelihood of a COVID-19 infection producing MIS-A or MIS-C; and treating the subject for MIS-A or MIS-C.

[0010] Further aspects of the inventive concept include arrays, such as a methylation bead array, of DNA methylation sites, computer implemented methods for executing any of the methods presented hereinabove, and machine learning algorithms for performing the methods presented hereinabove.

### BRIEF DESCRIPTION OF THE DRAWINGS

[0011] FIG. 1. Overall callrates for COVID− (light gray) & COVID+ (dark gray) based on detection calibrated from neg. probe set on EPIC.

[0012] FIG. 2. Volcano plot depicting CpG sites significantly associated with COVID-19 status at FD-adjusted p-value<0.05 after adjustment for bias and inflation (dark gray and identified dots). Additional sites (light gray dots) were significant before adjustment for bias and inflation. Black dots were not significant.

[0013] FIG. 3. Application to COVID-19 or MIS-C for determination of a methylation-based epigenetic signature for COVID-19 or MIS-C.

[0014] FIG. 4. Approach to characterize epigenetic signatures using samples from children with COVID-19 or MIS-C.

[0015] FIG. 5. Training and testing of on COVID-19+ cases and COVID-19− controls to develop a classifier for the EPIC+ chip.

[0016] FIG. 6. SARS-CoV-2 disease symptomatic continuum that can be characterized according to methods of the inventive concept.

[0017] FIG. 7 is a block diagram of a classification system, computer program product, and/or computer-implemented method that may be used with a platform according to embodiments of the inventive concept.

[0018] FIG. 8 depicts an outline for classifier generation according to methods of the inventive concept.

[0019] FIG. 9. Approaches of machine learning used for classifier generation according to the inventive concept.

### DETAILED DESCRIPTION

[0020] Two stages of the inventive concept have been developed. The first includes a customized version of Illumina's Infinium Methylation EPIC BeadChip Kit (EPIC) for selecting 50,000 CpG sites/methylation probes that perform best at producing a COVID-19 diagnostic signature. To customize the EPIC chip, the CCPM team leveraged data generated from 25 nasopharyngeal swabs (NPS) of COVID-19+ and COVID-19− patients and added to those results CpG sites previously reported in the public domain and associated with respiratory viral infections and cardiopulmonary complications associated with recent coronavirus outbreaks, plus all 26,000 known HLA alleles, plus alternative haplotypes and unpublished reference sequences spanning the MHC genomic region, the Natural Killer Cell Immunoreceptor (KIR) and other immunogenetic loci, to enhance the sensitivity of immune response detection. Following manufacturing of the EPIC+ chip, quantitative methylation was performed on DNA samples from 624 patients testing positive or negative for COVID-19 using standard clinical practice (rtPCR testing). The second includes using ˜50K optimal CpG sites selected to create the Infinium HTS Custom Methylation COVID-19 Panel, that will reliably predict SARS-CoV-2 infection in whole blood by combining data from the methylation chip with a machine learning disease classifier that we have developed. In addition to accurately predicting SARS-CoV-2 infection in the host, the Infinium HTS Custom Methylation COVID-19 Panel, in combination with machine learning classifiers, will also (i) discriminate SARS-CoV-2 from other coronaviruses and respiratory viruses; (ii) predict which patients go on to develop clinical complications after primary infection (i.e., acute respiratory distress syndrome); and (iii) characterize signatures associated with both short- and long-term recovery. This invention addresses an unmet need of high-throughput and inexpensive tests for detecting the novel coronavirus causing COVID-19, at scale. Although high-throughput, rapid tests for detecting the novel coronavirus causing COVID-19 are being developed at an exceptional pace, rtPCR and serology tests are viral strain dependent, typical turnaround times for these assays range from 8-48 hours; a few tests have been developed for more rapid turnaround (30 minutes), yet they carry a high false negative rate (26-100%), their utility is limited to COVID-19, and there have been significant supply chain issues. Moreover, testing in general has been limited to symptomatic patients, a strategy that fails to address the critical need for screening and community wide surveillance. As such, there remains a need for more accurate and rapid tests for SARS-CoV-2 infection and for COVID-19 diagnosis.

[0021] Current standard of care for diagnosing SARS-CoV-2 is either by rtPCR upon infection or through serology (post infection). These methods are limited in that they will be viral strain dependent and require designing rtPCR primers to amplify and detect the SARS-CoV-2 virus. This is a binary detection procedure (positive or negative) for only SARS-CoV-2, that is unable to assess risk for an infected individual to develop a multitude of symptoms. The rtPCR tests are also limited by requiring validation using patient nasopharyngeal swabs. The platform of the present inventive concept improves on standard of care in the following areas: 1) detects SARS-CoV-2 viral infection by measuring genetic changes within the host using custom targeted Illumina epigenetic microarray chips, thus making it strain independent; 2) able to predict risk factors for a patient to be asymptomatic, mild symptom display, up to severe symptoms (e.g. acute respiratory distress syndrome (ADRS) and/or multisystem inflammatory syndrome in children (MIS-C)); 3) identify additional signatures to differentially diagnose for other respiratory viruses, including but not limited to: (i) respiratory syncytial virus (RSV); (ii) parainfluenza (1,2,3,4); (iii) human metapneumovirus (hMPV); (iv) human rhinovirus; (v) adenovirus (Ad); and (vi) extant coronaviruses (e.g., 229E (alpha coronavirus); NL63 (alpha coronavirus); OC43 (beta coronavirus); HKU1 (beta coronavirus), etc.); 4) host genomic samples are either able to be collected using upper airway (e.g., NPS) or peripheral blood. Primary areas of innovation are the testing strategy detecting viral infection using host epigenetic changes as the marker, potential capability to comprehensively identify other respiratory infections, and ability to predict patient symptomatic response to SARS-CoV-2.

[0022] For the purposes of promoting an understanding of the principles of the present disclosure, reference will now be made to preferred embodiments and specific language will be used to describe the same. It will nevertheless be understood that no limitation of the scope of the disclosure is thereby intended, such alteration and further modifications of the disclosure as illustrated herein, being contemplated as would normally occur to one skilled in the art to which the disclosure relates.

[0023] Articles “a,” “an,” and “the” are used herein to refer to one or to more than one (i.e., at least one) of the grammatical object of the article. By way of example, “an element” means at least one element and can include more than one element. The term “and/or” includes any and all combinations of one, or more, of the associated listed items and may be abbreviated as “/”.

[0024] The term “comprise,” as used herein, in addition to its regular meaning, may also include, and, in some embodiments, may specifically refer to the expressions “consist essentially of” and/or “consist of” Thus, the expression “comprise” can also refer to embodiments, wherein that which is claimed “comprises” specifically listed elements does not include further elements, as well as embodiments wherein that which is claimed “comprises” specifically listed elements may and/or does encompass further elements, or encompass further elements that do not materially affect the basic and novel characteristic(s) of that which is claimed. For example, that which is claimed, such as a method, kit, system, etc. “comprising” specifically listed elements also encompasses, for example, a method, kit, system, etc. “consisting of,” i.e., wherein that which is claimed does not include further elements, and, for example, a method, kit, system, etc. “consisting essentially of,” i.e., wherein that which is claimed may include further elements that do not materially affect the basic and novel characteristic(s) of that which is claimed.

[0025] Unless otherwise defined, all technical terms used herein have the same meaning as commonly understood by one of ordinary skill in the art to which this disclosure belongs.

Methods of Testing, Diagnosing, Characterizing, and/or Predicting Outcomes

[0026] The present disclosure provides that alterations in genome-wide methylation patterns, in response to exposure respiratory viruses, such as SARS-CoV-2, can be used to identify and characterize, for example, presence of a viral infection, the nature of the viral infection, and/or probability for more severe manifestations of a viral infection in a subject with a high degree of accuracy.

[0027] The term “DNA methylation” and/or “gene methylation” refer to a biological process by which methyl groups are added to a DNA/nucleic acid molecule. DNA/gene/CpG island methylation may occur adenine (A) or cytosine (C), resulting in N⁶-methyladenosine (6 mA) for methylation of A, or 5-methylcytosine (5mC) and N⁴-methylcytosine (4mC) for C. In embodiments of the inventive concept, methylation levels of cytosine resulting in 5mC is measured/determined. In some embodiments, the extent of methylation of CpG dinucleotides in a DNA locus/gene is measured/determined. The methylated CpG dinucleotides may be located in CpG islands, regions in DNA that have a high frequency of CpG sites, as would be appreciated by one of skill in the art. In embodiments of the inventive concept, methylation of DNA/a set of gene loci and/or CpG islands located in DNA/gene/CpG island loci is measured in a subject and compared to DNA, gene, and/or CpG island methylation observed for populations having alternative biological states, e.g., a population having disease/infection vs. a population that is healthy/has no infection. In alternative biological states, e.g., disease/infection vs. healthy/no infection, in some embodiments, a particular DNA locus/gene may be hypomethylated, i.e., methylation of the DNA locus/gene in the disease/infection state is less than that of the healthy/no infection state, and in some embodiments, a particular DNA locus/gene may be hypermethylated, i.e., methylation of the DNA locus/gene in the disease/infection state is greater than that of the healthy/no infection state.

[0028] The term “signature,” according to embodiments of the inventive concept, can refer to a set of measurable quantities of biological markers, for example, genome-wide methylation patterns, genome-wide methylation of CpG islands, and/or methylation patterns of a set, e.g., a particular set and/or a pre-defined set, of genes/CpG islands, whose particular pattern/combination signifies the presence or absence of the specified biological state, such as a presence or absence of an infection or infections, such as, but not limited to: a SARS-CoV-2 infection, a respiratory syncytial virus (RSV) infection; a parainfluenza (1,2,3,4) infection; a human metapneumovirus (hMPV) infection; a human rhinovirus infection; an adenovirus (Ad) infection; and/or an extant coronavirus (e.g., 229E, alpha coronavirus; NL63, alpha coronavirus; OC43, beta coronavirus; HKU1, beta coronavirus) infection, or any combination thereof. In some embodiments, the particular pattern/combination signifies the presence or absence of a SARS-CoV-2 infection in a subject, and/or whether a subject is suffering from/afflicted with COVID-19, and/or the probability/likelihood the subject may be susceptible to and/is afflicted with more severe manifestations/symptoms of COVID-19, and/or a more severe condition related to the biological state, such as, acute respiratory distress syndrome (ARDS) and/or multiorgan failure in association with cytokine release and vascular leaks of immunopathology, e.g., multisystem inflammatory syndrome in adults (MIS-A) and/or multisystem inflammatory syndrome in children (MIS-C) associated with COVID-19. These signatures are discovered in a plurality of subjects with known status (e.g., COVID-19 positive, COVID-19 negative, confirmed with ARDS associated with COVID-19 and/or MIS-C associated with COVID-19), and are discriminative (individually or jointly) of one or more categories or outcomes of interest, for example, presence or absence of SARS-CoV-2, whether a subject is suffering from COVID-19, whether a subject is suffering from ARDS associated with COVID-19 and/or is more likely to suffer from ARDS associated with COVID-19, whether a subject is suffering from MIS-A associated with COVID-19 and/or is more likely to suffer from MIS-A associated with COVID-19, or whether a subject is suffering from MIS-C associated with COVID-19 and/or is more likely to suffer from MIS-C associated with COVID-19.

[0029] In some embodiments, a signature relates to a DNA/gene/CpG island methylation of a group/set of genes and/or methylation of CpG islands in the group/set of genes, for example, a set of genes including, but not necessarily limited to: ANLN, ARID3B, ARID5B, CALHM2, CBX3B2, CD38, CHSY1 CMPK2, DDX60, DTX3L, EPSTI1, FAM38A, FGFRL1, GPX1, GTPBP2, IFI27, IFIT3, IRF7, LINC00428, LINC01429, MX1, OAS1, OAS2, PARP9, PHOSPHO1, PPL, RAB40C, REPD, TNFRSF8, TRIM22, TSEN15, and ZDHHC6, or any subset thereof, whose methylation levels, when incorporated into a classifier as described herein, can discriminate the presence of specified biological states, such as, in some embodiments, presence or absence of SARS-CoV-2, whether a subject is suffering from COVID-19, whether a subject is suffering from ARDS associated with COVID-19 and/or is more likely to suffer from ARDS associated with COVID-19, or whether a subject is suffering from MIS-C associated with COVID-19 and/or is more likely to suffer from MIS-C associated with COVID-19. In some embodiments, a signature relates to a DNA/gene/CpG island methylation of a group/set of genes and/or methylation of CpG islands in the group/set of genes, for example, a set of genes including, but not necessarily limited to: ANLN, ARID3B, ARID5B, CALHM2, CBX3B2, CHSY1, DDX60, EPSTI1, FGFRL1, GPX1, IRF7, LINC00428, LINC01429, MX1, OAS1, OAS2, PARP9, PPL, RAB40C, REPD, TNFRSF8, TSEN15, and ZDHHC6, or any subset thereof. In some embodiments, the signature may include hypomethylation and/or hypermethylation of particular genes when comparing, for example, COVID-19+ and COVID-19− individuals. In some embodiments, the signature may include hypomethylation of IFR7, ARID5B, ANLN, PARP9, MX1, CBX3P2, EPSTI1, CHSY1, MX1, and/or GPX1, or any subset thereof. In some embodiments, the signature may include hypermethylation of LINC01429, CALHM2, LINC00428, OAS1, RAB40C, TSEN15, PEPD, PPL, ARID3B, ZDHHC6, TNFRSF8, DDX60, OAS2, and/or FGFRL1, or any subset thereof. In some embodiments, a signature relates to a DNA/gene/CpG island methylation of a group/set of genes and/or methylation of CpG islands in the group/set of genes, for example, a set of genes including, but not necessarily limited to: A_24_P561165; AA455656; AID; AIM2; ANLN; APE1; APOBEC3G; APOL2; APOL3; APOL6; ARID3B; ARID5B; ASK1; ATF2; B2M; BATF; BATF2; BCL2L14; C10orf81; C1R; C1S; C3; C4A; C4B; C5; C6; C7; C8; C9; CALHM2; CALR; CASP1; Caspase-3; Caspase-8; CBX3B2; CCRL1; CD19; CD4; CD74; CD8; CFH; CFHR1; CFHR3; CIITA; CIITA; CHSY1; BX117479; c-Jun; CLIC5; CTSS ZBP1; CX3CL1 A_24_P912985; CXCL10; CXCL11; CXCL2; DDX60; eIF-2; eIF2B; EPSTI1; ERP27; ETV7; FADD; FAM26F; FGFRL1; FZD5; GPX1; HCP5 NNMT; HLA-A; HLA-DMB; HLA-DOA; HLA-DPA1; HLA-DPB1; HLA-DQA1; HLA-DRA; HLA-DRB3; HLA-DRB4; HLA-DRB5; HLA-E; ICAM1; IFI16; IFI35; IFI44; IFI44L; IFIH1; IFIT2; IFIT3; IFIT5; IFITM1; IFNL1; IFNL2; IFNL3; IFNL4; IFN-α; IFN-β; IFNγ; IFN-γ; IFN-E; IFN-κ; IFN-ω; IGH; IGK; IGL; IKK-α; IKK-β; IKK-γ; IKKε; IL-10; IL-11; IL-12; IL12A; IL-13; IL-15; IL-17; IL-18; IL18BP; IL-1ra; IL-1α; IL-1β; IL-2; IL-3; IL-33; IL-36ra; IL-36α; IL-36β; IL-36γ; IL-37; IL-38; IL-4; IL-5; IL-6; IL-7; IL-8; IL-9; IRF1; IRF3; IRF7; JAK2; JNK; LAP3; LGP2; LINC00428; LINC01429; LT-α; M27126; MAVS; MDA5; MEKK1; MICA; MICAB; MKK7; MMP25; MX1; NAIP; NFKB1; NFKB2; NFKBIA; NLRC3; NLRC4; NLRC5; NLRP1; NLRP10; NLRP11; NLRP12; NLRP13; NLRP14; NLRP2; NLRP3; NLRP4; NLRP5; NLRP6; NLRP7; NLRP8; NLRP9; NLRX1; NMI; NOD1; NOD2; OAS1; OAS2; PARP9; PDIA3; PKR; PMAIP1; PML; POMC; PPL; PSMB8; PSMB9; RAB40C; REC8; REL; RELA; RELB; REPD; RIG-1; RIP; RNAse L; RTP4; SAMD9L; SECTM1; SEPX1; SERPING1; SOCS1; SP110; SPTLC3; SSTR2; STAT1; TAP1; TAP2; TAPBP; TBK1; TGFβ; TLR1; TLR10; TLR2; TLR3; TLR4; TLR5; TLR6; TLR7; TLR8; TLR9; TMEM140; TNF; TNFR1; TNFR2; TNFRSF8; TNFRSF14; TNFSF10; TNFSF13B; TP53; TRA; TRADD; TRAF2; TRAF3; TRB; TRD; TRG; TRIM25; TSEN15; UNG; VAMPS; WARS; XAF1; ZC3HAV1 and ZDHHC6, or any subset thereof. For example, in some embodiments, a subset of the group/set of genes, may include, for example: A_24_P561165; AA455656; AID; AIM2; APE1; APOBEC3G; APOL2; APOL3; APOL6; ASK1; ATF2; B2M; BATF; BATF2; BCL2L14; C10orf81; C1R; C1S; C3; C4A; C4B; C5; C6; C7; C8; C9; CALR; CASP1; Caspase-3; Caspase-8; CCRL1; CD19; CD4; CD74; CD8; CFH; CFHR1; CFHR3; CIITA; CIITA BX117479; c-Jun; CLIC5; CTSS ZBP1; CX3CL1 A _24_P912985; CXCL10; CXCL11; CXCL2; eIF-2; eIF2B; EPSTI1; ERP27; ETV7; FADD; FAM26F; FZD5; HCP5 NNMT; HLA-A; HLA-DMB; HLA-DOA; HLA-DPA1; HLA-DPB1; HLA-DQA1; HLA-DRA; HLA-DRB3; HLA-DRB4; HLA-DRB5; HLA-E; ICAM1; IFI16; IFI35; IFI44; IFI44L; IFIH1; IFIT2; IFIT3; IFIT5; IFITM1; IFNL1; IFNL2; IFNL3; IFNL4; IFN-α; IFN-β; IFNγ; IFN-γ; IFN-ε; IFN-κ; IFN-ω; IGH; IGK; IGL; IKK-α; IKK-β; IKK-γ; IKKε; IL-10; IL-11; IL-12; IL12A; IL-13; IL-15; IL-17; IL-18; IL18BP; IL-1ra; IL-1α; IL-1β; IL-2; IL-3; IL-33; IL-36ra; IL-36a; IL-3613; IL-36γ; IL-37; IL-38; IL-4; IL-5; IL-6; IL-7; IL-8; IL-9; IRF1; IRF3; IRF7; JAK2; JNK; LAP3; LGP2; LT-α; M27126; MAVS; MDA5; MEKK1; MICA; MICAB; MKK7; MMP25; MX1; NAIP; NFKB1; NFKB2; NFKBIA; NLRC3; NLRC4; NLRC5; NLRP1; NLRP10; NLRP11; NLRP12; NLRP13; NLRP14; NLRP2; NLRP3; NLRP4; NLRP5; NLRP6; NLRP7; NLRP8; NLRP9; NLRX1; NMI; NOD1; NOD2; OAS2; PDIA3; PKR; PMAIP1; PML; POMC; PSMB8; PSMB9; REC8; REL; RELA; RELB; RIG-1; RIP; RNAse L; RTP4; SAMD9L; SECTM1; SEPX1; SERPING1; SOCS1; SP110; SPTLC3; SSTR2; STAT1; TAP1; TAP2; TAPBP; TBK1; TGF13; TLR1; TLR10; TLR2; TLR3; TLR4; TLR5; TLR6; TLR7; TLR8; TLR9; TMEM140; TNF; TNFR1; TNFR2; TNFRSF14; TNFSF10; TNFSF13B; TP53; TRA; TRADD; TRAF2; TRAF3; TRB; TRD; TRG; TRIM25; UNG; VAMPS; WARS; XAF1; and ZC3HAV1, or any subset thereof.

[0030] As used herein, “array” can refer to a population of different microfeatures, such as microfeatures comprising polynucleotides, which are associated or attached with a surface such that the different microfeatures can be differentiated from each other according to relative location. An individual feature of an array can include a single copy of a microfeature or multiple copies of the microfeature can be present as a population of microfeatures at an individual feature of the array. The population of microfeatures at each feature typically is homogenous, having a single species of microfeature. Thus, multiple copies of a single nucleic acid sequence can be present at a feature, for example, on multiple nucleic acid molecules having the same sequence.

[0031] In some embodiments, a heterogeneous population of microfeatures can be present at a feature. Thus, a feature may but need not include only a single microfeature species and can instead contain a plurality of different microfeature species such as a mixture of nucleic acids having different sequences. Neighboring features of an array can be discrete one from the other in that they do not overlap. Accordingly, the features can be adjacent to each other or separated by a gap. In embodiments where features are spaced apart, neighboring sites can be separated, for example, by a distance of less than 100 pm, 50 pm, 10 pm, 5 pm, 1 pm, 0.5 pm, 100 nm, 50 nm, 10 nm, 5 nm, 1 nm, 0.5 nm, 100 pm, 50 pm, 1 pm or any distance within a range of any two of the foregoing distances. The layout of features on an array can also be understood in terms of center-to-center distances between neighboring features. An array useful in the invention can have neighboring features with center-to-center spacing of less than about 100 pm, 50 pm, 10 pm, 5 pm, 1 pm, 0.5 pm, 100 nm, 50 nm, 10 nm, 5 nm, 1 nm, 0.5 nm, 100 pm, 50 pm, 1 pm or any distance within a range of any two of the foregoing distances.

[0032] In some embodiments, the distance values described above and elsewhere herein can represent an average distance between neighboring features of an array. As such, not all neighboring features need to fall in the specified range unless specifically indicated to the contrary, for example, by a specific statement that the distance constitutes a threshold distance between all neighboring features of an array. Embodiments can be used with arrays having features at any of a variety of densities. Examples ranges of densities for certain embodiments include from about 10,000,000 features/cm² to about 2,000,000,000 features/cm²; from about 100,000,000 features/cm² to about 1,000,000,000 features/cm²; from about 100,000 features/cm² to about 10,000,000 features/cm²; from about 1,000,000 features/cm² to about 5,000,000 features/cm²; from about 10,000 features/cm² to about 100,000 features/cm²; from about 20,000 features/cm² to about 50,000 features/cm²; from about 1,000 features/cm² to about 5,000 features/cm², or any density within a range of any two of the foregoing densities.

[0033] As used herein, “surface” can refer to a part of a substrate or support structure that is accessible to contact with reagents, beads or analytes. The surface can be substantially flat or planar. Alternatively, the surface can be rounded or contoured. Example contours that can be included on a surface are wells, depressions, pillars, ridges, channels or the like. Example materials that can be used as a substrate or support structure include glass such as modified or functionalized glass; plastic such as acrylic, polystyrene or a copolymer of styrene and another material, polypropylene, polyethylene, polybutylene, polyurethane or TEFLON; polysaccharides or cross-linked polysaccharides such as agarose or Sepharose; nylon; nitrocellulose; resin; silica or silica-based materials including silicon and modified silicon; carbon-fiber; metal; inorganic glass; optical fiber bundle, or a variety of other polymers. A single material or mixture of several different materials can form a surface useful in the invention. In some embodiments, a surface comprises wells. In some embodiments, a support structure can include one or more layers. Example support structures can include a chip, a film, a multi-well plate, and a flow-cell.

[0034] As used herein, “bead” can refer to a small body made of a rigid or semi rigid material. The body can have a shape characterized, for example, as a sphere, oval, microsphere, or other recognized particle shape whether having regular or irregular dimensions. Example materials that are useful for beads include glass such as modified or functionalized glass; plastic such as acrylic, polystyrene or a copolymer of styrene and another material, polypropylene, polyethylene, polybutylene, polyurethane or TEFLON; polysaccharides or cross-linked polysaccharides such as agarose or Sepharose; nylon; nitrocellulose; resin; silica or silica-based materials including silicon and modified silicon; carbon-fiber; metal; inorganic glass; or a variety of other polymers. Example beads include controlled pore glass beads, paramagnetic beads, thoria sol, Sepharose beads, nanocrystals and others known in the art. Beads can be made of biological or non-biological materials. Magnetic beads are particularly useful due to the ease of manipulation of magnetic beads using magnets at various steps of the methods described herein. Beads used in certain embodiments can have a diameter, width, or length from about 0.1 pm to about 100 pm, from about 0.1 nm to about 500 nm. In some embodiments, beads used in certain embodiments can have a diameter, width or length less than about 100 pm, 50 pm, 10 pm, 5 pm, 1 pm, 0.5 pm, 100 nm, 50 nm, 10 nm, 5 nm, 1 nm, 0.5 nm, 100 pm, 50 pm, 1 pm or any diameter, width or length within a range of any two of the foregoing diameters, widths or lengths. Bead size can be selected to have reduced size, and hence get more features per unit area, whilst maintaining sufficient signal (template copies per feature) in order to analyze the features.

[0035] In some embodiments, polynucleotides can be attached to beads. In some embodiments, the beads can be distributed into wells on the surface of a substrate. Example bead arrays that can be used in certain embodiments include randomly ordered BEAD ARRAY technology (Illumina Inc., San Diego CA). Such bead arrays are disclosed in Michael et al, Anal Chem 70, 1242-8 (1998); Walt, Science 287, 451-2 (2000); Fan et al., Cold Spring Harb Symp Quant Biol 68:69-78 (2003); Gunderson et al., Nat Genet 37:549-54 (2005); Bibikova et al. Am J Pathol 165: 1799-807 (2004); Fan et al., Genome Res 14:878-85 (2004); Kuhn et al., Genome Res 14:2347-56 (2004); Yeakley et al., Nat Biotechnol 20:353-8 (2002); and Bibikova et al., Genome Res 16:383-93 (2006), each of which is incorporated by reference in its entirety.

[0036] As used herein, “target nucleic acid” or grammatical equivalent thereof can refer to nucleic acid molecules or sequences that it is desired to sequence, analyze and/or further manipulate. In some embodiments, a target nucleic acid can be attached to an array. In some embodiments, a capture probe can be attached to an array and the array used subsequently to detect a target nucleic acid in a sample that interacts with the probe. In this regard, it will be understood that in some embodiments, the terms “target” and “probe” can be used interchangeably with regard to nucleic acid detection methods.

[0037] In some embodiments, the number of different probes on an array range from 500 to 100,000. In other embodiments, the number of different targets on the array is at least 500, 1,000, 5,000, 10,000, 15,000, 20,000, 25,000, 30,000, 35,000, 40,000, 45,000, 50,000, 55,000, 60,000, 65,000, 70,000, 75,000, 80,000, 85,000, 90,000, 95,000, 100,000, 150,000, 200,000, 250,000, 300,000, 350,000, 400,000, 450,000, 500,000, 550,000, 600,000, 650,000, 700,000, 750,000, 800,000, 850,000, 900,000, 950,000, or 1,000,000.

[0038] As used herein, “capture probe” can refer to a polynucleotide having sufficient complementarity to specifically hybridize to a target nucleic acid. A capture probe can function as an affinity binding molecule for isolation of a target nucleic acid from other nucleic acids and/or components in a mixture. In some embodiments, a target nucleic acid can be specifically bound by a capture probe through intervening molecules. Examples of intervening molecules include linkers, adapters and other bridging nucleic acids having sufficient complementarity to specifically hybridize to both a target sequence and a capture probe.

[0039] For the COVID-19 methylation analyses of the inventive concept, included are probes designed to target the following genes: ABCF1, ACBD5, AGL, AGPAT1, AIF1, ANKRD28, APOBEC3G, APOL6, APPBP2, ASPM, ATAT1, ATP2C1, B2M, BCL2L14, BRD2, C1orf68, C2, C4A, C4B, C6orf136, C6orf15, C7, CALR, CATSPER2, CATSPER2P1, CATSPERG, CCDC66, CCHCR1, CD27-AS1, CD4, CD40, CDKN1A, CELF4, CEP162, CFB, CFH, CFHR1, CFHR2, CFHR3, CFHR4, CHTOP, CIITA, CSNK2B, CTNND1, CUTA, CYP21A2, DAG1, DDR1, DENND2B, DEXI, DTNB, DYSF, E2F5, EGFL8, EHMT2, ELAVL2, FAM49B, FKBP5, FLG, FLG-AS1, FRMD3, GAPVD1, GPANK1, GPX5, GTF2H4, HCG17, HCG18, HCG20, HCG22, HCG24, HCG25, HCG27, HCG4, HCG4B, HCP5, HLA-A, HLA-B, HLA-C, HLA-DPA1, HLA-DPB1, HLA-DPB2, HLA-DQA1, HLA-DQA2, HLA-DQB1, HLA-DQB1-AS1, HLA-DRA, HLA-E, HLA-F, HLA-F-AS1, HLA-G, HLA-H, HLA-V, HRNR, HSD17B8, HSPA1B, ICAM1, IFI16, IFI35, IFI44, IFI44L, IFITM1, IVL, JAK2, KCTD16, KDM4C, KIFC1, KPRP, LAP3, LCE1D, LCE1E, LCE2B, LCE2C, LCE2D, LCE3C, LCE4A, LELP1, LINC00302, LINC01185, LOC100129636, LOC100294145, LOC100507547, LOC101929006, LOC105375690, LRBA, LST1, LTA, LTBR, LY6G6F-LY6G6D, LYRM4-AS1, MCCD1, MDC1, MEF2C, MICA, MICA-AS1, MICB, MICB-DT, MIR219A1, MIR4479, MMP25, MOG, MPIG6B, MSH5, MUCL3, MX1, NA, NBPF18P, NELFE, NFKB1, NFKB2, NLRC5, NLRP11, NLRP2, NLRP3, NLRP4, NLRP5, NLRX1, NRCAM, OR10C1, OR12D2, OR14J1, OR2H1, OR2H2, OR2J1, OR2J2, OSMR, PCDH15, PDCD6IPP2, PDIA3, PGLYRP4, PHF1, PML, PPP1R11, PPP2R5A, PPP6R3, PPT2, PRR3, PRR9, PRRC2A, PRRT1, PSMB8-AS1, PSMB9, PSORS1C1, PSORS1C2, RALYL, REC8, REL, RELB, RING1, RNF43, RNF5, RNF5P1, RPL13A, RP S18, RPS6KC1, RTP4, RXRB, S100A13, S100A7, S100A8, SCNN1A, SERPINB7, SERPING1, SHMT1, SKIV2L, SLC44A4, SLCO5A1, SMURF2P1-LRRC37BP1, SNAPC3, SNHG32, SNORD32B, SNX14, SPRR1A, SPRR1B, SPRR3, SPRR4, SPTLC3, STAT4, STOML1, SUN1, SYNGAP1, TAP1, TBC1D5, TBK1, TCF19, THRB, TK2, TLR2, TLR3, TLR4, TMEM185A, TMEM62, TNF, TNFRSF14, TNFRSF14-AS1, TNFSF13B, TPTE2P5, TRAF2, TRAF3, TRIM10, TRIM15, TRIM27, TRIM33, TRIM37, TRIM39, TRIM40, TRIT1, TRPM4, TSBP1, TSBP1-AS1, TUBB, UBE2K, USP8, VARS2, VEZT, VPS52, XAF1, XPOT, YY1AP1, ZMYND11, ZNF248, ZNF512, ZNF610, and ZNRD1ASP. Sequences for probes to these genes include those as set forth in SEQ ID NOS:1-7,831 of the accompanying Sequence Listing, entitled IP-2201-PCT_SL.txt, or any subset thereof.

[0040] In some embodiments, the probes include at least one sequence from the group consisting of SEQ ID NOS:42, 48, 49, 56, 60, 152, 153, 154, 155, 156, 160, 161, 170, 174, 175, 176, 192, 195, 196, 205, 206, 207, 208, 209, 210, 211, 217, 219, 220, 221, 222, 235, 255, 294, 295, 298, 299, 300, 310, 315, 322, 329, 330, 331, 337, 602, 607, 608, 668, 669, 677, 678, 738, 750, 751, 756, 757, 761, 762, 769, 770, 773, 776, 777, 779, 829, 830, 842, 843, 846, 847, 855, 856, 857, 858, 860, 864, 869, 870, 877, 882, 904, 905, 916, 922, 923, 924, 925, 933, 942, 943, 959, 964, 965, 966, 969, 981, 982, 999, 1000, 1002, 1003, 1004, 1005, 1035, 1036, 1046, 1047, 1048, 1049, 1062, 1063, 1090, 1095, 1096, 1097, 1122, 1123, 1138, 1145, 1146, 1155, 1156, 1158, 1165, 1173, 1174, 1180, 1181, 1185, 1210, 1211, 1216, 1217, 1219, 1220, 1225, 1237, 1238, 1247, 1248, 1249, 1250, 1254, 1255, 1256, 1259, 1260, 1263, 1270, 1271, 1296, 1297, 1308, 1309, 1312, 1314, 1318, 1319, 1326, 1328, 1329, 1342, 1348, 1405, 1406, 1413, 1414, 1415, 1416, 1433, 1434, 1443, 1444, 1465, 1470, 1476, 1485, 1486, 1487, 1508, 1509, 1510, 1514, 1612, 1613, 1620, 1627, 1638, 1639, 1664, 1665, 1666, 1669, 1670, 1676, 1677, 1684, 1685, 1701, 1712, 1719, 1720, 1721, 1722, 1726, 1727, 1731, 1738, 1740, 1747, 1748, 1852, 1853, 1854, 1939, 2072, 2073, 2075, 2088, 2090, 2171, 2193, 2194, 2434, 2435, 2604, 2676, 2678, 2680, 2681, 2756, 2914, 2915, 2919, 2920, 3180, 3243, 3774, 3775, 3994, 3995, 3996, 3998, 3999, 4000, 4020, 4021, 4030, 4031, 4046, 4103, 4171, 4179, 4184, 4187, 4188, 4225, 4236, 4251, 4253, 4257, 4258, 4259, 4262, 4263, 4272, 4276, 4277, 4278, 4292, 4293, 4313, 4314, 4316, 4317, 4318, 4328, 4329, 4330, 4343, 4344, 4345, 4357, 4358, 4376, 4377, 4384, 4389, 4390, 4402, 4408, 4409, 4410, 4411, 4414, 4415, 4416, 4418, 4419, 4421, 4422, 4426, 4427, 4430, 4439, 4453, 4454, 4456, 4457, 4458, 4479, 4487, 4488, 4491, 4492, 4493, 4494, 4500, 4501, 4518, 4519, 4525, 4526, 4539, 4540, 4555, 4562, 4563, 4564, 4584, 4585, 4586, 4589, 4594, 4595, 4596, 4597, 4615, 4617, 4618, 4619, 4620, 4621, 4622, 4627, 4628, 4629, 4630, 4631, 4632, 4657, 4658, 4661, 4662, 4671, 4673, 4689, 4690, 4691, 4697, 4698, 4716, 4717, 4726, 4727, 4728, 4729, 4731, 4747, 4768, 4773, 4774, 4778, 4779, 4780, 4781, 4782, 4783, 4784, 4785, 4968, 4969, 4976, 4977, 4987, 4993, 4994, 4995, 4999, 5005, 5006, 5020, 5025, 5026, 5027, 5035, 5049, 5050, 5055, 5056, 5158, 5164, 5171, 5172, 5173, 5188, 5189, 5190, 5191, 5192, 5193, 5204, 5206, 5208, 5209, 5210, 5211, 5212, 5213, 5214, 5217, 5219, 5220, 5225, 5232, 5233, 5234, 5235, 5238, 5239, 5240, 5241, 5294, 5295, 5296, 5313, 5316, 5327, 5370, 5375, 5376, 5377, 5378, 5379, 5385, 5507, 5508, 5509, 5510, 5511, 5512, 5513, 5514, 5515, 5516, 5517, 5561, 5572, 5573, 5574, 5577, 5578, 5579, 5585, 5586, 5592, 5645, 5646, 5649, 5650, 5656, 5657, 5667, 5672, 5681, 5684, 5695, 5696, 5697, 5698, 5699, 5700, 5701, 5702, 5710, 5711, 5720, 5725, 5728, 5729, 5730, 5743, 5744, 5745, 5748, 5749, 5759, 5760, 5761, 5765, 5766, 5768, 5769, 5772, 5780, 5781, 5782, 5802, 5803, 5804, 5807, 5808, 5809, 5813, 5814, 5816, 5817, 5828, 5829, 5833, 5910, 5914, 5917, 5937, 5941, 5942, 5944, 5945, 5948, 5949, 5963, 6018, 6019, 6023, 6031, 6032, 6033, 6039, 6040, 6043, 6045, 6109, 6110, 6111, 6112, 6113, 6116, 6127, 6128, 6133, 6134, 6137, 6225, 6236, 6242, 6449, 6450, 6451, 6452, 6453, 6454, 6455, 6457, 6458, 6461, 6462, 6463, 6466, 6469, 6470, 6471, 6480, 6481, 6545, 6546, 6547, 6613, 6684, 6685, 6692, 6693, 6694, 6695, 6710, 6711, 6731, 6732, 6741, 6787, 6788, 6805, 6806, 6807, 6828, 6829, 6830, 6831, 6832, 6835, 6836, 6846, 6847, 6848, 6849, 6850, 6862, 6868, 6869, 6870, 6871, 6878, 6879, 6897, 6898, 6899, 6900, 6908, 6909, 6914, 6938, 6939, 6949, 6950, 6951, 6952, 6959, 6960, 6971, 6972, 6973, 6974, 6976, 6979, 7110, 7111, 7112, 7113, 7117, 7118, 7120, 7122, 7124, 7135, 7184, 7185, 7401, 7402, 7404, 7408, 7441, 7442, 7482, 7490, 7491, 7497, 7500, 7503, 7504, 7513, 7514, 7515, 7525, 7526, 7621, 7622, 7623, 7624, 7625, 7626, 7627, 7638, 7649, 7650, 7651, 7652, 7665, 7694, 7704, 7705, 7708, 7716, 7717, 7718, 7726, 7727, 7728, 7729, 7738, 7739, 7740, 7741, 7742, 7743, 7744, 7746, 7747, 7749, 7757, 7770, 7771, 7774, 7775, 7777, 7783, 7788, 7789, 7790, 7791, 7798, 7799, 7803, 7804, 7815, 7816, 7823, 7824, and 7825 of the accompanying Sequence Listing, or any subset thereof.

[0041] In some embodiments, the methylation signature includes detecting methylation status of at least one gene selected from the group consisting of: ABCF1, ABCF1, AIF1, APOBEC3G, APOL6, B2M, BCL2L14, BRD2, C2, C6orf136, C6orf15, C7, CALR, CD27-AS1, CD4, CD40, CFB, CFH, CHTOP, CIITA, CSNK2B, CUTA, CYP21A2, DDR1, DEXI, EGFL8, EHMT2, GPANK1, GPX5, GTF2H4, HCG17, HCG18, HCG20, HCG25, HCG27, HCG4, HCG4B, HLA-A, HLA-DPA1, HLA-DPB2, HLA-DQA2, HLA-E, HLA-F, HLA-F-AS1, HLA-G, HLA-V, ICAM1, IFI16, IFI35, IFI44, IFI44L, IFITM1, IVL, KIFC1, KPRP, LCE1D, LCE1E, LCE2C, LELP1, LINC00302, LOC100507547, LOC101929006, LY6G6F-LY6G6D, MICA-AS1, MICB, MICB-DT, MSH5, MX1, NA, NBPF18P, NFKB1, NFKB2, NLRC5, NLRP11, NLRP3, NLRP5, NLRX1, OR2H1, OSMR, PDIA3, PHF1, PML, PPP1R11, PPT2, PRR9, PRRC2A, PSMB8-AS1, PSMB9, PSORS1C1, REC8, REL, RELB, RING1, RNF5, RPS18, RTP4, RXRB, S100A13, SCNN1A, SERPING1, SKIV2L, SLC44A4, SNORD32B, SPRR4, SPTLC3, SYNGAP1, TAP1, TBK1, TCF19, TLR3, TNF, TNFRSF14, TNFSF13B, TRAF2, TRAF3, TRIM15, TRIM27, TRIM39, TSBP1-AS1, TUBB, VARS2, VPS52, XAF1, and ZNRD1ASP, or any subset thereof.

[0042] The terms “classifier” and “predictor” may be used interchangeably and refer to a process for determining a category that a sample may be assigned to, that uses the values of the signature (e.g., methylation levels for a set of genes) and a pre-determined coefficient (or weight) for each signature component to generate scores for a given observation or individual patient for the purpose of assignment to a category. The classifier may be linear and/or probabilistic. A classifier is linear if scores are a function of summed signature values weighted by a set of coefficients. Furthermore, a classifier is probabilistic if the function of signature values generates a probability, a value between 0 and 1.0 (or 0 and 100%) quantifying the likelihood that a subject or observation belongs to a particular category or will have a particular outcome, respectively. Probit regression and logistic regression are examples of probabilistic linear classifiers that use probit and logistic link functions, respectively, to generate a probability. In some embodiments, the classifier may be a process to bin samples into categories depending on specified measured characteristics, for example, observed DNA/gene/CpG island methylation levels.

[0043] The classifier equation may take, for example, the general form:

P(having condition)=Φ(β₁X₁+β₂X₂+ . . . +β_{d}X_{d})

wherein the condition is, e.g., presence of a SARS-CoV-2 infection, and/or susceptibility for ARDS/MIS-A/MIS-C. Φ(.) is the probit (or logistic, etc.) link function; {β₁, β₂, . . . , β_{d}} are the coefficients obtained through training of the classifier when the host response biomarker is translated to the platform (the coefficients may also be denoted {w₁, w₂, . . . , w_{d}} as “weights” herein); {X₁, X₂, . . . , X_{d}} are the DNA/gene/CpG island methylation levels of the signature/biomarker; and d is the size of the signature/biomarker (i.e., number of methylation sites/loci).

[0044] It should be noted that the threshold or cutoff value may be adjusted to accommodate the diagnostic decision. For example, the threshold for diagnosing a bacterial infection may be lowered to favor test sensitivity and thus reduce the possibility of a potentially life-threatening false negative result.

[0045] A classifier may be developed by a procedure known as “training,” which makes use of a set of data containing observations, for example, DNA/gene/CpG island methylation levels, with known category membership. Specifically, training seeks to find the optimal coefficient (i.e., weight) for each component of a given signature (e.g., DNA/gene/CpG island methylation levels and differential DNA/gene/CpG island methylation levels of components), as well as an optimal signature, such as a set of genes/biomarkers, where the optimal result is determined by the highest achievable classification accuracy. DNA/CpG islands with higher degrees of methylation differences between positive cases and negative controls are typically the probes that are selected as features/components for the signature. Classifiers of the inventive concept may be generated, for example, by iteratively: assigning a weight for the extent of methylation of each DNA locus/gene, entering the weight and value for the extent of methylation of each DNA locus/gene into a classifier equation and determining a score for outcome for each of a plurality of subjects; determining the accuracy of classification for each outcome across the plurality of subjects, and adjusting the weight until accuracy of classification is optimized, to provide the classifier. Classifiers of the inventive concept include, for example, classifiers for whether a subject patient is infected with SARS-CoV-2, whether a subject is suffering from COVID-19, whether a subject is suffering from ARDS associated with COVID-19 and/or is more likely to suffer from ARDS associated with COVID-19, or whether a subject is suffering from MIS-C associated with COVID-19 and/or is more likely to suffer from MIS-C associated with COVID-19. The classifiers that are developed during training, using a training set of samples, are applied for prediction purposes to diagnose new individuals (“classification”).

[0046] In some embodiments, classifiers of the inventive concept may be developed/generated using a support-vector machine/machines (SVM/SVMs). Any SVM available may be used for generating the classifier as would be appreciated by one of skill in the art. Software, for example, svmlib/libsvm may be used for training and/or optimization of the classifier. Improving performance of the classifier may be accomplished by either better feature selection (DNA/gene/CpG island methylation sites/components of the signature), such as selecting DNA/CpG islands with higher degrees of methylation differences between positive cases and negative controls, or by gathering further data/observations.

[0047] “Classification” may refer to a method of assigning a subject suffering from or at risk for symptoms to one or more categories or outcomes (e.g., a whether subject/patient is infected with SARS-CoV-2, whether a subject is suffering from COVID-19, whether a subject is suffering from ARDS associated with COVID-19 and/or is more likely to suffer from ARDS associated with COVID-19, whether a subject is suffering from MIS-A associated with COVID-19 and/or is more likely to suffer from MIS-A associated with COVID-19, or whether a subject is suffering from MIS-C associated with COVID-19 and/or is more likely to suffer from MIS-C associated with COVID-19). In some cases, a subject may be classified to more than one category, e.g., in case of suffering from COVID-19 and is more likely to suffer from MIS-C associated with COVID-19. The outcome, or category, is determined by the value of the scores provided by/derived from the classifier, which may be compared to a cutoff or threshold value, confidence level, or limit. In other scenarios, the probability of belonging to a particular category may be given (e.g., if the classifier reports probabilities). In some embodiments, a high probability or likelihood reported by the classifier may be about 0.7 or greater, may be about 0.75 or greater, about 0.8 or greater, about 0.85 or greater, about 0.9 or greater, about 0.95 or greater, about 0.98 or greater, or about 0.99 or greater. In some embodiments a high percentage likelihood reported by the classifier may be about 70% or greater, about 75% or greater, about 80% or greater, about 85% or greater, about 90% or greater, about 95% or greater, about 98% or greater, or about 99% or greater.

[0048] The term “indicative,” when used with DNA/gene/CpG island methylation levels, can mean that the DNA/gene/CpG island methylation levels are up-regulated or down-regulated, altered, or changed compared to the levels in alternative biological states (e.g., whether or not a patient/subject is infected with SARS-CoV-2, whether a subject is suffering from COVID-19, whether a subject is suffering from ARDS associated with COVID-19 and/or is more likely to suffer from ARDS associated with COVID-19, or whether a subject is suffering from MIS-C associated with COVID-19 and/or is more likely to suffer from MIS-C associated with COVID-19) or control. The term “indicative” when used with DNA/gene/CpG island methylation levels means that the DNA/gene/CpG island methylation levels are higher or lower, increased or decreased, altered, or changed compared to the standard protein levels or levels in alternative biological states. Measured DNA/gene/CpG island methylation levels, when analyzed with pre-determining weights in the context of a classifier, such as a classifier for a presence of SARS-CoV-2, whether a subject is suffering from COVID-19, i.e., disease associated with SARS-CoV-2, whether a subject is suffering from more severe symptoms associated with COVID-19 and/or is more likely to suffer from more severe symptoms associated with COVID-19, whether a subject is suffering from ARDS associated with COVID-19 and/or is more likely to suffer from ARDS associated with COVID-19, or whether a subject is suffering from MIS-C associated with COVID-19 and/or is more likely to suffer from MIS-C associated with COVID-19 as described herein, may provide a score/outcome/result “indicative” of the presence of SARS-CoV-2, whether a subject is suffering from COVID-19, whether a subject is suffering from ARDS associated with COVID-19 and/or is more likely to suffer from ARDS associated with COVID-19, or whether a subject is suffering from MIS-C associated with COVID-19 and/or is more likely to suffer from MIS-C associated with COVID-19.

[0049] It will be appreciated that symptoms for SARS-CoV-2 disease (COVID-19) spread across a spectrum/continuum of states, including asymptomatic disease. Symptoms may include, but are not limited to, for example: fever and/or chills; cough; shortness of breath and/or difficulty breathing; fatigue; muscle and/or body aches; headache; new loss of taste and/or smell; sore throat; congestion and/or runny nose; nausea and/or vomiting; and diarrhea. More severe symptoms may include, but are not limited to, symptoms that may require immediate emergency medical care, for example: trouble breathing; persistent pain or pressure in the chest; new confusion; inability to wake or stay awake; and, depending on skin tone, pale, gray, or blue-colored skin, lips, or nail beds. Severe SARS-CoV-2 disease may also include ARDS, MIS-A, and/or MIS-C associated with COVID-19.

[0050] The terms “subject” and “patient” may be used interchangeably and refer to any animal being examined, studied, or treated. It is not intended that the present disclosure be limited to any particular type of subject. In some embodiments of the present invention, humans are the preferred subject, while in other embodiments non-human animals are the preferred subject, including, but not limited to, mice, monkeys, ferrets, cattle, sheep, goats, pigs, chicken, turkeys, dogs, cats, horses and reptiles, and for example, a laboratory animal such as a rat, mouse, guinea pig, rabbit, primates, etc.), a farm or commercial animal (e.g., a cow, pig, horse, goat, donkey, sheep, etc.), or a domestic animal (e.g., cat, dog, ferret, horse, etc.). Human subjects may be of any gender (for example, male, female or transgender) and at any stage of development (i.e., neonate, infant, juvenile, adolescent, adult, elderly). In some embodiments, the subject may be a human subject that may be suffering from more severe symptoms associated with COVID-19 and/or is more likely to suffer from more severe symptoms associated with COVID-19. In some embodiments, the subject may be a human subject that may be suffering from ARDS associated with COVID-19 and/or is more likely to suffer from ARDS associated with COVID-19. In some embodiments, the subject may be an adult or elderly human subject that may be suffering from MIS-A associated with COVID-19 and/or is more likely to suffer from MIS-A associated with COVID-19. In some embodiments, the subject may be a non-adult or non-elderly human subject (i.e., a neonate, infant, juvenile, or adolescent human subject) that may be suffering from MIS-C associated with COVID-19 and/or is more likely to suffer from MIS-C associated with COVID-19.

[0051] In some embodiments, the subject is at high risk for contracting a coronavirus, such as SARS-CoV-2, and/or for suffering from more severe symptoms associated with SARS-CoV-2 disease. In some embodiments, the subject is aged 65 or older, has high blood pressure, asthma, lung disease, cancer, diabetes, Down syndrome, heart disease/conditions, HIV, kidney disease, liver disease, lung disease, sickle cell disease or thalassemia, a neurological condition such as dementia, a substance use disorder, had a solid organ or blood stem cell transplant, and/or had a stroke/cerebrovascular disease, is pregnant, is overweight/obese, smokes, and/or is immunocompromised. In some embodiments, the immunocompromised subject may have an immunodeficiency disease and/or may have a deficiency in Type I IFN defenses.

[0052] A “platform” or “technology” refers to an apparatus (e.g., instrument and associated parts, computer, computer-readable media including one or more databases as taught herein, reagents, arrays, etc.) that may be used to measure a signature, e.g., DNA/gene/CpG island methylation levels, in accordance with the inventive concept. Examples of platforms for analyzing/measuring DNA/gene/CpG island methylation levels may include methylation bead chips. Exemplary methylation bead chips include for example, commercial platforms, such as the Illumina Infinium Methylation EPIC BeadChip Kit, and custom platforms, such as a customized Illumina Infinium Methylation EPIC BeadChip Kit (EPIC+), and an Illumina Infinium HTS Custom Methylation COVID-19 Panel as described herein.

[0053] In some embodiments, the platform may be configured to measure DNA/gene/CpG island methylation levels semi-quantitatively, i.e., rather than measuring discrete or absolute DNA/gene/CpG island methylation levels, the DNA/gene/CpG island methylation levels are measured as an estimate and/or relative to each other or a specified marker or markers (e.g., DNA/gene/CpG island methylation of another, “standard” or “reference” gene/marker).

[0054] Analysis of DNA/gene/CpG island methylation, according to embodiments of the inventive concept, may include treating DNA with bisulfite, e.g., sodium bisulfite prior to nucleic acid amplification/methylation analysis. Analysis of DNA/gene/CpG island methylation, according to embodiments of the inventive concept, may include nucleic acid amplification of bisulfite-treated DNA. Nucleic acid amplification, according to embodiments of the inventive concept, may be accomplished by any method that would be appreciated by one of skill in the art. In some embodiments, nucleic acid amplification may include whole genome amplification (WGA) of bisulfite-treated DNA by way of, for example, random hexamer primer priming and and Phi29 polymerase and enzymatic fragmentation of amplification products prior to DNA/gene/CpG island methylation analysis. Nucleic acid amplification products of bisulfite-treated DNA may then be analyzed with a platform or technology as described herein.

[0055] Nucleic acid amplification may include thermal amplification, such as Polymerase Chain Reaction (PCR), or may be include isothermal amplification, such as Loop-Mediated Isothermal Amplification (LAMP), Multiple Displacement Amplification (MDA), Strand Displacement Amplification (SDA), Helicase-Dependent Amplification (HDA), Recombinase Polymerase Amplification (RPA), Nucleic Acid Sequences Based Amplification (NASBA), Rolling Circle Amplification (RCA).

[0056] The term “biological sample” includes any sample that may be taken from a subject/biological source that contains genetic material that can be used in the methods provided herein. For example, a biological sample may include a blood sample, such as a peripheral blood sample. The term “peripheral blood sample” refers to a sample of blood circulating in the circulatory system or body taken from the system of body. Other samples may include those taken from the upper respiratory tract, including but not limited to, sputum, nasopharyngeal swab (NPS) and nasopharyngeal wash, or synovial fluid, or cerebrospinal fluid. A biological sample may also include those samples taken from the lower respiratory tract, including but not limited to, sputum, bronchoalveolar lavage and endotracheal aspirate. A biological sample may also include any combinations thereof. A “biological source” includes, for example, human or non-human subjects (“in vivo”), cultured cells (“in vitro”), and primary human tissues (“ex vivo”) from which a sample/biological sample may be obtained/derived from. Measurements/determinations/analysis of, for example, DNA/gene/CpG island methylation levels of genes, in a biological source or in biological sources include, and may be provided by, in some embodiments, measurements/determinations/analysis of DNA/gene/CpG island methylation levels of genes in a sample/biological sample derived from the biological source.

[0057] The terms “obtaining,” “gathering,” and/or “collecting,” when referring to methylation levels of genes and/or DNA methylation levels may include experimentally measuring methylation levels of DNA/gene/CpG island methylation levels in, for example, a sample/biological sample derived from, for example, a biological source, as well as drawing measured/determined DNA/gene/CpG island methylation levels from, for example, public and/or commercially available databases of DNA/gene/CpG island methylation data that are or will be available to one of skill in the art. The terms “obtaining,” “gathering,” and/or “collecting,” when referring to a sample, such as a biological sample, may include experimentally obtained, gathered, and/or collected samples from a source, such as a biological source, as well samples drawn from, for example, publicly available and/or commercial repositories as will be appreciated by one of skill in the art.

[0058] The terms “treat”, “treatment” and “treating” refer to the reduction or amelioration of the severity, duration and/or progression of a disease or disorder, or one or more symptoms thereof resulting from the administration of one or more therapies. Such terms may refer to a reduction in the replication of pathogens, such as respiratory viruses as described herein, or a reduction in the spread of pathogens to other organs or tissues in a subject or to other subjects.

[0059] An “appropriate treatment regimen” refers to the standard of care needed to treat a specific disease or disorder. Often such regimens require the act of administering to a subject a therapeutic agent(s) capable of producing a curative effect in a disease state. For example, an appropriate treatment regimen may include administration of any therapeutic agent for treatment of pathogens, for example, respiratory viruses as described herein, such as, but not limited to: SARS-CoV-2 (the coronavirus associated with coronavirus disease 2019, or COVID-19); respiratory syncytial virus (RSV); parainfluenza (1,2,3,4); human metapneumovirus (hMPV); human rhinovirus; adenovirus (Ad); and extant coronaviruses, e.g., 229E (alpha coronavirus); NL63 (alpha coronavirus); OC43 (beta coronavirus); HKU1 (beta coronavirus); MERS-CoV (the beta coronavirus associated with Middle East Respiratory Syndrome, or MERS); and/or SARS-CoV (the beta coronavirus associated with severe acute respiratory syndrome, or SARS), in an appropriate amount as would be appreciated by one of skill in the art. The inventive concept further contemplates the use of methods according to the inventive concept to determine treatments of such pathogens with therapeutics, that are not yet available. In some embodiments, the inventive concept contemplates treating and/or preventing any virus/viral infection belonging to the Coronaviridae family now known or yet to be discovered.

### Systems and Computer-Implemented Methods

[0060] A classification system, computer program product, and/or computer-implemented methods may be used in or by a platform, according to various embodiments described herein. A classification system, computer program product, and/or computer-implemented method may be embodied as one or more enterprise, application, personal, pervasive and/or embedded computer systems that are operable to receive, transmit, process and store data using any suitable combination of software, firmware and/or hardware and that may be standalone and/or interconnected by any conventional, public and/or private, real and/or virtual, wired and/or wireless network including all or a portion of the global communication network known as the Internet, and may include various types of tangible, non-transitory computer readable medium. Hardware on which classification systems, computer program products and/or computer-implemented methods of the inventive concept may be used is not particularly limited, and may include, without limitation, personal computers, handheld and/or mobile devices, phones, etc. In some embodiments, the systems, computer programs, and/or compute-implemented methods of the inventive concept may be cloud-based.

[0061] The classification system may include a processor subsystem, including one or more Central Processing Units (CPU) on which one or more operating systems and/or one or more applications run. It will be understood that multiple processors may be present, which may be either electrically interconnected or separate. Processor(s) are configured to execute computer program code from memory devices, such as memory, to perform at least some of the operations and methods described herein, and may be any conventional or special purpose processor, including, but not limited to, digital signal processor (DSP), field programmable gate array (FPGA), application specific integrated circuit (ASIC), and multi-core processors.

[0062] The memory subsystem may include a hierarchy of memory devices such as random-access memory (RAM), read-only memory (ROM), erasable programmable read-only memory (EPROM) or flash memory, and/or any other solid state memory devices.

[0063] A storage circuit may also be provided, which may include, for example, a portable computer diskette, a hard disk, a portable compact disk read-only memory (CDROM), an optical storage device, a magnetic storage device and/or any other kind of disk- or tape-based storage subsystem. The storage circuit may be provided on hardware including, but not limited to, computers, such as personal computers (PCs), mobile/handheld devices, such as tablets and/or mobile phones, etc., or may be provided on the cloud. The storage circuit may provide non-volatile storage of data/parameters/classifiers for the classification system. The storage circuit may include disk drive and/or network store components. The storage circuit may be used to store code to be executed and/or data to be accessed by the processor. In some embodiments, the storage circuit may store databases which provide access to the data/parameters/classifiers used for the classification system such as the signatures, weights, thresholds, etc. Any combination of one or more computer readable media may be utilized by the storage circuit. The computer readable media may be a computer readable signal medium or a computer readable storage medium. A computer readable storage medium may be, for example, but not limited to, an electronic, magnetic, optical, electromagnetic, infrared, or semiconductor system, apparatus, or device, or any suitable combination of the foregoing. More specific examples (a non-exhaustive list) of the computer readable storage medium would include the following: a portable computer diskette, a hard disk, a random-access memory (RAM), a read-only memory (ROM), an erasable programmable read-only memory (EPROM or flash memory), a portable compact disc read-only memory (CD-ROM), an optical storage device, a magnetic storage device, or any suitable combination of the foregoing. As used herein, a computer readable storage medium may be any tangible medium that can contain or store a program for use by or in connection with an instruction execution system, apparatus, or device.

[0064] An input/output circuit may include displays and/or user input devices, such as keyboards, touch screens and/or pointing devices. Devices attached to the input/output circuit may be used to provide information to the processor by a user of the classification system. Devices attached to the input/output circuit may include networking or communication controllers, input devices (keyboard, a mouse, touch screen, etc.) and output devices (printer or display). The input/output circuit may also provide an interface to devices, such as a display and/or printer, to which results of the operations of the classification system can be communicated so as to be provided to the user of the classification system.

[0065] An optional update circuit may be included as an interface for providing updates to the classification system. Updates may include updates to the code executed by the processor that are stored in the memory and/or the storage circuit. Updates provided via the update circuit may also include updates to portions of the storage circuit related to a database and/or other data storage format which maintains information for the classification system, such as the signatures, weights, thresholds, etc.

[0066] The sample input circuit of the classification system may provide an interface for the platform as described hereinabove to receive biological samples to be analyzed. The sample input circuit may include mechanical elements, as well as electrical elements, which receive a biological sample provided by a user to the classification system and transport the biological sample within the classification system and/or platform to be processed. The sample input circuit may include a bar code reader that identifies a bar-coded container for identification of the sample and/or test order form. The sample processing circuit may further process the biological sample within the classification system and/or platform so as to prepare the biological sample for automated analysis. The sample analysis circuit may automatically analyze the processed biological sample. The sample analysis circuit may be used in measuring, e.g., DNA/gene/CpG island methylation levels of a group/set of genes with the biological sample provided to the classification system. In some embodiments, measuring DNA/methylation levels of a group/set of genes is accomplished on a commercial platform, such as the Illumina Infinium Methylation EPIC BeadChip Kit. In some embodiments, measuring DNA/methylation levels of a group/set of genes is accomplished on custom platforms, such as a customized Illumina Infinium Methylation EPIC BeadChip Kit (EPIC+), and an Illumina Infinium HTS Custom Methylation COVID-19 Panel as described herein. The sample analysis circuit may also retrieve from the storage circuit a classifier for whether a subject infected with SARS-CoV-2, whether a subject is suffering from COVID-19, whether a subject is suffering from ARDS associated with COVID-19 and/or is more likely to suffer from ARDS associated with COVID-19, or whether a subject is suffering from MIS-C associated with COVID-19 and/or is more likely to suffer from MIS-C associated with COVID-19, the classifier(s) include pre-defined weighting values (i.e., coefficients) for each of the gene/DNA methylation sites in the group/set of genes. The sample analysis circuit may enter DNA/gene/CpG island methylation values into one or more classifiers selected from the classifier for whether a subject infected with SARS-CoV-2, whether a subject is suffering from COVID-19, whether a subject is suffering from ARDS associated with COVID-19 and/or is more likely to suffer from ARDS associated with COVID-19, or whether a subject is suffering from MIS-C associated with COVID-19 and/or is more likely to suffer from MIS-C associated with COVID-19. The sample analysis circuit may calculate a probability for one or more of whether the subject has a SARS-CoV-2 infection, whether a subject is suffering from COVID-19, whether a subject is suffering from ARDS associated with COVID-19 and/or is more likely to suffer from ARDS associated with COVID-19, or whether a subject is suffering from MIS-C associated with COVID-19 and/or is more likely to suffer from MIS-C associated with COVID-19 based upon said classifier(s) and control output, via the input/output circuit, of a determination whether an SARS-CoV-2 infection is present or absent, whether a subject is suffering from COVID-19, whether a subject is suffering from ARDS associated with COVID-19 and/or is more likely to suffer from ARDS associated with COVID-19, or whether a subject is suffering from MIS-C associated with COVID-19 and/or is more likely to suffer from MIS-C associated with COVID-19, or some combination thereof. In some embodiments, the sample analysis circuit may calculate a probability or score for the presence of an infection or absence of an infection, such as an infection with SARS-CoV-2, and/or wherein presence of an infection is indicative of a presence of, a likelihood that, and/or a risk that a subject may suffer from ARDS and/or MIS-C.

[0067] The sample input circuit, the sample processing circuit, the sample analysis circuit, the input/output circuit, the storage circuit, and/or the update circuit may execute at least partially under the control of the one or more processors of the classification system. As used herein, executing “under the control” of the processor means that the operations performed by the sample input circuit, the sample processing circuit, the sample analysis circuit, the input/output circuit, the storage circuit, and/or the update circuit may be at least partially executed and/or directed by the processor, but does not preclude at least a portion of the operations of those components being separately electrically or mechanically automated. The processor may control the operations of the classification system, as described herein, via the execution of computer program code.

[0068] Computer program code for carrying out operations for aspects of the present disclosure may be written in any combination of one or more programming languages, including an object oriented programming language such as Java, Scala, Smalltalk, Eiffel, JADE, Emerald, C++, C#, VB.NET, Python or the like, conventional procedural programming languages, such as the “C” programming language, Visual Basic, Fortran 2003, Perl, COBOL 2002, PHP, ABAP, dynamic programming languages such as Python, Ruby and Groovy, or other programming languages. The program code may execute entirely on the classification system, partly on the classification system, as a stand-alone software package, partly on the classification system and partly on a remote computer or entirely on the remote computer or server. In the latter scenario, the remote computer may be connected to the classification system through any type of network, including a local area network (LAN) or a wide area network (WAN), or the connection may be made to an external computer (for example, through the Internet using an Internet Service Provider) or in a cloud computer environment or offered as a service such as a Software as a Service (SaaS).

[0069] In some embodiments, the system includes computer readable code that can transform quantitative, or semi-quantitative, detection of DNA/gene/CpG island methylation to a cumulative score or probability of the etiology of an infection. In some embodiments, the system includes computer readable code that can transform quantitative, or semi-quantitative, detection of DNA/gene/CpG island methylation to a cumulative score or probability of a presence or absence of an infection, wherein presence of an infection may be indicative of the presence of SARS-CoV-2, whether a subject is suffering from COVID-19, whether a subject is suffering from ARDS associated with COVID-19 and/or is more likely to suffer from ARDS associated with COVID-19, whether a subject is suffering form MIS-A associated with COVID-19 and/or is more likely to suffer from MIS-A associated with COVID-19, or whether a subject is suffering from MIS-C associated with COVID-19 and/or is more likely to suffer from MIS-C associated with COVID-19.

[0070] Algorithms used in the methods of the inventive concept may include any machine learning approaches that would be appreciated by one of skill in the art including, for example, linear regression ElasticNet regression, Ridge regression, LASSO regression, support vector machine (SVM) regression, Random Forest® and/or XGBoost decision tree algorithms. In some embodiments, a first machine learning approach may be used to optimize features for a second machine learning approach. For example, SVM training on an initial sample set may be followed by XGBoost decision tree training on further samples in generating a classifier.

[0071] In some embodiments, the system is a sample-to-result system, with the components integrated such that a user can simply insert a biological sample to be tested, and a period of time later (preferably a short amount of time, e.g., 10, 30 or 45 minutes, or 1, 2, or 3 hours, up to 8, 12, 24 or 48 hours) receive a result output from the system.

[0072] A block diagram of a classification system, computer program product, and/or computer-implemented method that may be used with a platform is depicted in FIG. 7. A classification system 700, computer program product, and/or computer-implemented method may include a processor subsystem 740, including one or more Central Processing Units (CPU) on which one or more operating systems and/or one or more applications run. While one processor 740 is shown, it will be understood that multiple processors 740 may be present, which may be either electrically interconnected or separate. Processor(s) 740 are configured to execute computer program code from memory devices, such as memory 750, to perform at least some of the operations and methods described herein. The storage circuit 770 may store databases which provide access to the data/parameters/classifiers used by the classification system 700 such as the signatures, weights, thresholds, etc. An input/output circuit 760 may include displays and/or user input devices, such as keyboards, touch screens and/or pointing devices. Devices attached to the input/output circuit 760 may be used to provide information to the processor 740 by a user of the classification system 700. Devices attached to the input/output circuit 760 may include networking or communication controllers, input devices (keyboard, a mouse, touch screen, etc.) and output devices (printer or display). An optional update circuit 780 may be included as an interface for providing updates to the classification system 700 such as updates to the code executed by the processor 740 that are stored in the memory 750 and/or the storage circuit 770. Updates provided via the update circuit 780 may also include updates to portions of the storage circuit 770 related to a database and/or other data storage format which maintains information for the classification system 700, such as the signatures, weights, thresholds, etc. The sample input circuit 710 provides an interface for the classification system 700 to receive biological samples to be analyzed. The sample processing circuit 720 may further process the biological sample within the classification system 700 so as to prepare the biological sample for automated analysis by the sample analysis circuit 730. The sample processing circuit 720 and/or sample analysis circuit 730 may operate in conjunction with a platform or technology as described herein, such as, for example, the Illumina Infinium Methylation EPIC BeadChip Kit, the Illumina Infinium Methylation EPIC BeadChip Kit (EPIC+), and the Illumina Infinium HTS Custom Methylation COVID-19 Panel as described herein.

[0073] It is to be understood that the invention is not limited in its application to the details of construction and the arrangement of components set forth in the following description or illustrated in the following drawings. The invention is capable of other embodiments and of being practiced or of being carried out in various ways.

[0074] Having described various aspects of the inventive concept, the same will be explained in further detail in the following examples, which are included herein for illustrative purposes, and which are not intended to be limiting to the invention.

### Example 1: Epigenetic Hypomethylation and Prediction of Covid-19-Related Outcomes

[0075] 1. COVID-19 signatures from the Infinium Methylation EPIC BeadChip Kit. Illumina's Infinium Methylation Bead Array has been the workhorse providing the majority of actionable data leveraged in this application, and the latest expansion of the Infinium Methylation technology (i.e., the EPIC BeadChip) provides near epigenome wide coverage (1). The team amassed for the application has considerable expertise in identifying methylation changes associated with respiratory and allergic disease (2-22) and phenotypes associated with viral dissemination (23) leveraging the EPIC platform, through individual research projects and as an institutional service in the Colorado Anschutz Research Genetics Organization (CARGO). Another critical consideration is that the emerging field of epigenetics has demonstrated actionable classification with much smaller sample sizes in contrast to traditional GWAS (24), and the sample size that is proposed (N>3,000) in this application exceeds the power necessary to detect true associations.

[0076] With a goal to leverage EPIC's coverage to classify differential methylation signatures of COVID-19+ and COVID-19− samples, an initial study was completed to demonstrate the ability to accurately distinguish COVID-19+ and COVID-19− DNA samples, and to inform development of a customized Infinium Methylation EPIC BeadChip Kit (referred to as the EPIC Plus) for testing on a larger number of patient samples (Phase 1). The ultimate goal of developing the EPIC Plus chip was to select ˜50K probes for the creation of the Infinium HTS Custom Methylation COVID-19 Panel, the planned platform for the studies in this application (Phase 2). Residual nucleic acid in elution buffer samples from nasopharyngeal swabs (NPS) from 25 patients undergoing rtPCR-based COVID-19 testing in the CCPM Biobank were analyzed for concentration and purity and then bisulfite converted using the EZ DNA Methylation Gold kit (Zymo, Irvine, CA). The bisulfite treated DNA was subjected to whole genome amplification (WGA) via random hexamer priming and Phi29 DNA polymerase, and the amplification products were enzymatically fragmented25, purified from dNTPs, primers, and enzymes, and processed on the Infinium 850K (EPIC) Methylation chip. Overall, via rtPCR, 15 samples tested COVID-19 negative, and 10 COVID-19 positive. The analysis was integrated with existing EPIC NPS methylation data (n=164); as these pre-existing samples were collected pre-COVID-19, they represented appropriate unexposed controls in this proof-of-concept study. With these 15 samples (i) sample process feasibility was demonstrated as quality control filters (implemented in seSAMe (26)) using both negative control probe metrics and seSAMe's p-value-based PooBAH detection thresholds showed >98% call rates, indicating high quality data (FIG. 1). (ii) Using the DML function in seSAMe, 776 sites were identified between COVID-19+ and COVID-19− individuals with delta beta (change in average methylation status). (iii) By increasing the sample size and leveraging 164 pre-COVID-19 controls, the number of delta beta>0.2 probes was increased that could reliably detect between the 2 groups to 25,000. The libsvm package was then used for support vector machine (SVM) (27) training and testing. A two-fold cross validation test was performed to demonstrate clear signal between cases and controls: 3 different SVM classification methods and 3 different detection p-value methods and thresholds were tested (Table 1). Classification accuracy based on 776 CpG sites and 15 samples ranged from 84.6-100. Using 25,000 sites and 164 samples in a L2-regularized L2-loss SVM (dual) classifier and with the negative p-value selection method resulted in 93.7-95.7 accuracy. These results demonstrated very clearly that COVID+ and COVID− samples can be distinguished using epigenetic markers and provided key data for moving forward with the EPIC customization.

[0077] 2. Development and implementation of a customized Infinium Methylation EPIC BeadChip Kit. Leveraging data generated from NPS samples of COVID-19+ and COVID-19− patients (Section 1 above), in addition to known epigenetic associations with respiratory viral infections and cardiopulmonary complications associated with recent coronavirus outbreaks, all 26,000 known HLA alleles were also targeted, as well as multiple alternative haplotypes and unpublished reference sequences spanning the MHC genomic region, the Natural Killer Cell Immunoreceptor (KIR) and other immunogenetic loci, to enhance the sensitivity of immune response detection and developed a customized Infinium Methylation EPIC BeadChip Kit. The custom ‘EPIC Plus’ chip included ˜10 k sites targeted to increase coverage of the immune response gene panel (Table 2). Table 3 summarizes how the customized chip complements sites already present on the standard EPIC chip. Chips for testing of up to 624 DNA samples were manufactured and provided by Illumina.

[0078] Currently, genomic DNA from 312 COVID-19+ and 312 COVID-19− blood samples are being processed, collected from patients recruited through existing protocols at the University of Colorado to (i) confirm the ability to identify an epigenetic signature for SARS-CoV-2 infection and early-stage diagnosis of COVID-19 using genomic DNA from whole blood; and (ii) characterize the epigenetic signature that accurately predicts SARS-CoV-2 infection (confirmed by conventional clinical rtPCR testing and serological data) and select 50K optimal CpG sites to create the Infinium HTS Custom Methylation COVID-19 Panel.

[0079] 3. Identification of COVID-19 signatures from the EPIC+ chip using blood biospecimens from COVID19 tested patients (Phase 1). Given that genomic DNA from blood is a much more feasible tissue source from suspected COVID-19 cases at scale (largely because it eliminates concerns regarding supply chain issues associated with swabs for the collection of NPS), and because blood has proven a reliable source for generating epigenetic signatures and disease classifiers predicting disease (28-34), the focus was shifted from DNA from NPS samples in the pilot study to blood for Phase 1. To date, results on the first 90 of 624 samples have been generated from the EPIC Plus chip. Identical to the pilot study, DNA samples were analyzed for concentration and purity and then bisulfite converted using the EZ DNA Methylation Gold kit (Zymo, Irvine, CA) as described above, and amplified DNA was processed on the newly developed EPIC Plus methylation chip. Eighty-six samples passed detection p-value cutoffs using the SeSAMe package's PooBAH algorithm, yielding an increased data set of 43 COVID+ and 43 COVID processed over the initial 10 COVID-19+ and 15 COVID-19− controls for training. These samples were split randomly into three groups for three-fold cross validation training and testing using the R implementation of XGBoost (Extreme Gradient Boosting). Table 1 summarizes results from the initial batch of samples in Phase 1. Similar to the pilot study, the Differentially Methylated Loci (DML) function were first applied from SeSAMe package to rank all loci in each random partition. The top N ranked loci were picked for each partition, where N ranged from 100, 1000, 10 k, 50 k, 100 k and 1M (data only shown for 1 k and 10 k). For each bucket training and testing was carried out using XGBoost with default parameters (Table 4).

[0080] Besides improving the machine leaning techniques and increasing the sample size beyond the pilot study, in Phase 1 the content of the EPIC array has also been extended by ˜10 k loci to extend host immune response genes. Moreover, a new probe design is included that enables detection and measurement of DNA methylation at multiple specific sites in the human genome. This design type enables epigenetic detection classification in highly homologous regions such as HLA. These new probe designs showed greater than chance selection by the DML algorithm. With the improved machine learning algorithms, increased dataset, improved targeting and novel Infinium probe designs, the strong epigenetic signature between COVID+ and COVID− samples recapitulates in whole blood. It is indicated that the accuracy of this detection is only bounded by the number of samples available to train.

[0081] 4. Epigenome-wide association study (EWAS) with SARS-CoV-2 infection status. To evaluate epigenome-wide DNA methylation patterns in SARS-CoV-2 infection, peripheral blood was analyzed from data from 43 COVID+ and 43 COVID− individuals described in Section 3 above on the Illumina EPIC Plus array. Illumina idat signal intensity files were processed using seSAMe (26). Probes containing a SNP site (minor allele frequency >1% in the general population) as well as probes with non-unique mapping and off-target hybridization were removed. Additionally, probes with an average detection p value ≥0.05 across samples were removed prior to analysis. This resulted in 748,416 probes that passed quality control and were tested for association with COVID-19 status in an epigenome-wide association analysis (EWAS). Principal component regression analysis (PCRA) was used to identify array position as a strong batch effect and was regressed out using ComBat (35). Differentially methylated CpGs were identified using linear models in Limma (36), adjusting for age, sex, and race/ethnicity. p values were adjusted for inflation and bias using Bacon (37) and for multiple comparisons using the Benjamini-Hochberg False Discovery Rate (FDR) (38). This analysis identified 145 CpGs significant at FDR-adjusted p-value<0.05 (FIG. 2). A CpG within the Interferon Response Factor 7 (IRF7) gene is the most hypomethylated, with an average change in methylation of −23% in the COVID19 positive compared to COVID-19 negative group. Furthermore, enrichment analysis identified multiple interferon-related categories as most enriched within differentially methylated genes (GO Biological Process Cellular Response to Type I Interferon, BioPlanet Pathway Interferon Alpha/Beta Signaling, Jensen Compartments Interferon Regulatory Factor Complex and others). These data suggest hypomethylation and therefore activation of interferon response, as has been previously observed for SARS infections (39,40). Significant differences were not observed in cell proportions in COVID-19 positive and COVID-19 negative groups, as estimated using the Houseman method (41), indicating that the methylation changes we identified are not confounded by cell proportions.

### REFERENCES

[0082] 1 Pidsley, R. et al. Critical evaluation of the Illumina MethylationEPIC BeadChip microarray for whole-genome DNA methylation profiling. Genome Biol 17, 208, doi:10.1186/s13059-016-1066-1 (2016).
[0083] 2 Breton, C. V. et al. Prenatal tobacco smoke exposure is associated with childhood DNA CpG methylation. PloS one 9, e99716, doi:10.1371/journal.pone.0099716 (2014).
[0084] 3 Kothari, P. H. et al. Role of local CpG DNA methylation in mediating the 17q21 asthma susceptibility gasdermin B (GSDMB)/ORMDL sphingolipid biosynthesis regulator 3 (ORMDL3) expression quantitative trait locus. The Journal of allergy and clinical immunology 141, 2282-2286 e2286, doi:10.1016/j.jaci.2017.11.057 (2018).
[0085] 4 Yang, I. V. et al. Relationship of DNA methylation and gene expression in idiopathic pulmonary fibrosis. American journal of respiratory and critical care medicine 190, 1263-1272, doi:10.1164/rccm.201408-14520C (2014).
[0086] 5 Eyring, K. R., Pedersen, B. S., Yang, I. V. & Schwartz, D. A. In Utero Cigarette Smoke Affects Allergic Airway Disease But Does Not Alter the Lung Methylome. PloS one 10, e0144087, doi:10.1371/journal.pone.0144087 (2015).
[0087] 6 Helling, B. A. & Yang, I. V. Epigenetics in lung fibrosis: from pathobiology to treatment perspective. Current opinion in pulmonary medicine 21, 454-462, doi:10.1097/MCP.0000000000000191 (2015).
[0088] 7 Liang, L. et al. An epigenome-wide association study of total serum immunoglobulin E concentration. Nature 520, 670-674, doi:10.1038/nature14125 (2015).
[0089] 8 Yang, I. V. et al. DNA methylation and childhood asthma in the inner city. The Journal of allergy and clinical immunology 136, 69-80, doi:10.1016/j.jaci.2015.01.025 (2015).
[0090] 9 Breton, C. V. et al. Small-Magnitude Effect Sizes in Epigenetic End Points are Important in Children's Environmental Health Studies: The Children's Environmental Health and Disease Prevention Research Center's Epigenetics Working Group. Environmental health perspectives 125, 511-526, doi:10.1289/EHP595 (2017).
[0091] 10 Helling, B. A. et al. Regulation of MUC5B Expression in Idiopathic Pulmonary Fibrosis. American journal of respiratory cell and molecular biology 57, 91-99, doi:10.1165/rcmb.2017-00460C (2017).
[0092] 11 Yang, I. V., Lozupone, C. A. & Schwartz, D. A. The environment, epigenome, and asthma. The Journal of allergy and clinical immunology 140, 14-23, doi:10.1016/j.jaci0.2017.05.011 (2017).
[0093] 12 Yang, I. V. et al. The nasal methylome and childhood atopic asthma. Journal of Allergy and Clinical Immunology 139, 1478-1488, doi:10.1016/j.jaci.2016.07.036 (2017).
[0094] 13 Yang, I. V. et al. The Nasal Methylome: A Key to Understanding Allergic Asthma. American journal of respiratory and critical care medicine 195, 829-831, doi:10.1164/rccm.201608-1558LE (2017).
[0095] 14 Davidson, E. J. & Yang, I. V. Role of epigenetics in the development of childhood asthma. Current opinion in allergy and clinical immunology 18, 132-138, doi:10.1097/ACI.0000000000000429 (2018).
[0096] 15 Eyring, K. R. et al. Methylene-tetrahydrofolate reductase contributes to allergic airway disease. PloS one 13, e0190916, doi:10.1371/journal.pone.0190916 (2018).
[0097] 16 Yang, I. V. DNA methylation signatures of atopy and asthma. Lancet Respir Med, doi:10.1016/S2213 2600(18)30504-6 (2018).
[0098] 17 Reese, S. E. et al. Epigenome-wide meta-analysis of DNA methylation and childhood asthma. The Journal of allergy and clinical immunology 143, 2062-2074, doi:10.1016/j.jaci.2018.11.043 (2019).
[0099] 18 Yang, I. V. et al. DNA Methylation Changes in Lung Immune Cells Are Associated with Granulomatous Lung Disease. American journal of respiratory cell and molecular biology 60, 96-105, doi:10.1165/rcmb.2018-01770C (2019).
[0100] 19 Qi, C. et al. Nasal DNA methylation profiling of asthma and rhinitis. The Journal of allergy and clinical immunology, doi:10.1016/j.jaci.2019.12.911 (2020).
[0101] 20 Yang I V et al. DNA Methylation Changes and Childhood Asthma in the Inner City J Allergy Clin Immunol. accepted (2015).
[0102] 21 Forno, E. et al. DNA methylation in nasal epithelium, atopy, and atopic asthma in children: a genomewide study. Lancet Respir Med, doi:10.1016/S2213-2600(18)30466-1 (2018).
[0103] 22 Cardenas, A. et al. The nasal methylome as a biomarker of asthma and airway inflammation in children. Nature communications 10, 3095, doi:10.1038/s41467-019-11058-3 (2019).
[0104] 23 Boorgula, M. P. et al. Replicated methylation changes associated with eczema herpeticum and allergic response. Clinical epigenetics 11, 122, doi:10.1186/s13148-019-0714-1 (2019).
[0105] 24 Tsai, P. C. & Bell, J. T. Power and sample size estimation for epigenome-wide association scans to detect differential DNA methylation. Int J Epidemiol 44, 1429-1441, doi:10.1093/ije/dyv041 (2015).
[0106] 25 Weisenberger D J, V. D. B. D., Pan F, Berman B P, and Laird P W. Comprehensive DNA Methylation Analysis on the Illumina Infinium Assay Platform. Illumina application note (2008).
[0107] 26 Zhou, W., Triche, T. J., Jr., Laird, P. W. & Shen, H. SeSAMe: reducing artifactual detection of DNA methylation by Infinium BeadChips in genomic deletions. Nucleic Acids Res 46, e123, doi:10.1093/nar/gky691 (2018).
[0108] 27 Chang, C.-C. & Lin, C.-J. LIBSVM: a library for support vector machines. ACM Transactions on Intelligent Systems and Technology 2:27, 1-27 (2011).
[0109] 28 Jiang, H. et al. DNA methylation markers in the diagnosis and prognosis of common leukemias. Signal Transduct Target Ther 5, 3, doi:10.1038/s41392-019-0090-5 (2020).
[0110] 29 Ciolfi, A. et al. Frameshift mutations at the C-terminus of HIST1H1E result in a specific DNA hypomethylation signature. Clin Epigenetics 12, 7, doi:10.1186/s13148-019-0804-0 (2020).
[0111] 30 Wang, L., Ni, S., Du, Z. & Li, X. A six-CpG-based methylation markers for the diagnosis of ovarian cancer in blood. J Cell Biochem 121, 1409-1419, doi:10.1002/jcb.29376 (2020).
[0112] 31 Imgenberg-Kreuz, J. et al. Shared and Unique Patterns of DNA Methylation in Systemic Lupus Erythematosus and Primary Sjogren's Syndrome. Front Immunol 10, 1686, doi:10.3389/fimmu.2019.01686 (2019).
[0113] 32 Bend, E. G. et al. Gene domain-specific DNA methylation episignatures highlight distinct molecular entities of ADNP syndrome. Clin Epigenetics 11, 64, doi:10.1186/s13148-019-0658-5 (2019).
[0114] 33 Wang, C., Chen, L., Yang, Y., Zhang, M. & Wong, G. Identification of potential blood biomarkers for Parkinson's disease by gene expression and DNA methylation data integration analysis. Clin Epigenetics 11, 24, doi:10.1186/s13148-019-0621-5 (2019).
[0115] 34 Panagopoulou, M. et al. Circulating cell-free DNA in breast cancer: size profiling, levels, and methylation patterns lead to prognostic and predictive classifiers. Oncogene 38, 3387-3401, doi:10.1038/s41388-018-0660-y (2019).
[0116] 35 Leek, J. T., Johnson, W. E., Parker, H. S., Jaffe, A. E. & Storey, J. D. The sva package for removing batch effects and other unwanted variation in high-throughput experiments. Bioinformatics 28, 882-883, doi:10.1093/bioinformatics/bts034 (2012).
[0117] 36 Ritchie, M. E. et al. limma powers differential expression analyses for RNA-sequencing and microarray studies. Nucleic acids research 43, e47, doi:10.1093/nar/gkv007 (2015).
[0118] 37 van Iterson, M., van Zwet, E. W., Consortium, B. & Heijmans, B. T. Controlling bias and inflation in epigenome- and transcriptome-wide association studies using the empirical null distribution. Genome biology 18, 19, doi:10.1186/s13059-016-1131-9 (2017).
[0119] 38 Benjamini, Y. & Hochberg, Y. Controlling the False Discovery Rate: A Practical and Powerful Approach to Multiple Testing. Journal of the Royal Statistical Society. Series B (Methodological) 57, 289-300 (1995).
[0120] 39 Totura, A. L. & Baric, R. S. SARS coronavirus pathogenesis: host innate immune responses and viral antagonism of interferon. Curr Opin Virol 2, 264-275, doi:10.1016/j.coviro.2012.04.004 (2012).
[0121] 40 Menachery, V. D. et al. Pathogenic influenza viruses and coronaviruses utilize similar and contrasting approaches to control interferon-stimulated gene responses. mBio 5, e01174-01114, doi:10.1128/mBio.01174-14 (2014).
[0122] 41 Houseman, E. A. et al. DNA methylation arrays as surrogate measures of cell mixture distribution. BMC bioinformatics 13, 86, doi:10.1186/1471-2105-13-86 (2012).

### Example 2: Potential Role for Epigenetic Signatures in the Clinical Presentation of Multisystem Inflammatory Syndrome in Children (MIS-C) Associated with Covid-19

[0123] Enveloped RNA viruses (e.g., coronavirus) manipulate the host's epigenome by antagonizing & regulating the host innate immune antiviral defense processes, specifically via DNA methylation. Epigenetic modification has been reported in other viral infections (influenza, respiratory syncytial virus, rhinovirus, adenovirus), respiratory (i.e., asthma, COPD) & CVD, complications of COVID-19. Epigenetic changes may predict worsening of cardio-respiratory complications associated with COVID-19 infection (i.e., ARDS), and multisystem inflammatory syndrome in children (MIS-C) associated with COVID-19.

[0124] The German Cancer Research Center (DKFZ) deployed DNA methylation-based diagnosis for CNS tumor diagnostics. Unsupervised clustering of DNA methylation array data for >90 CNS tumor types showed that distinct tumors are well-classified based on their epigenetic signatures. Using the Illumina EPIC methylation array, the DKFZ created a web-distributed random forest classifier to accurately diagnose CNS tumor type. The classifier reduced tumor misclassification by ˜15% (see, Sawahla et al. DNA methylation-based classification of central nervous system tumors. Nature 555, 469, doi:10.1038/nature26000).

[0125] For application methylation-based classification to COVID-19 and complications associated with COVID-19, DNA methylation patterns are analyzed in DNA extracted from blood samples from COVID-19+ and COVID-19− patients (FIG. 3). The isolated DNA samples are analyzed for concentration and purity and subjected to bisulfite conversion using an automated Hamilton protocol for the EZ DNA Methylation Lightning MagPrep kit (ZYMO, Irvine, CA). The bisulfite-converted DNA is subjected to amplification and the amplified DNA processed on the newly developed Infinium EPIC Plus methylation chip (Phase 1) and on an Infinium HTS custom methylation COVID-19 panel (Phase 2). Methylation is quantified through hybridization, fluorescence staining, chip scanning, and data analysis, and diagnostic signatures provided for COVID-19, respiratory viral infections, and worsening of disease, for example, diagnostic signatures can be provided through analysis using samples from children with COVID-19 and/or MIS-C (FIG. 4). Exemplary SVM training and testing on COVID-19+ cases and COVID-19− controls is depicted in FIG. 5 and summarized in Table 1 of EXAMPLE 1.

[0126] The Infinium HTS custom methylation COVID-19 panel can be used to assess disease state within the SARS-CoV-2 disease symptomatic continuum shown in FIG. 6, from asymptomatic, to mild, to severe, and to MIS-C. The custom panel provides high coverage and accuracy at a low cost (less than about $100/sample) with results in about 48 hours. It can be widely deployed, as it runs on, for example, the Illumina Infinium platform in research and clinical laboratories, as well as devices, such as NextSeq550, found in and routinely available in smaller clinical laboratories. Maximum throughput possible is shown in Table 5. Requirements per test is about 500 ng genomic DNA that can be collected in, for example, a dedicated 4 mL aliquot of EDTA (average yield=about 50 ng/μL, equivalent to ˜7.5 μL).

### Example 3: Analysis Pipeline and Machine Learning Approaches

[0127] Classifiers for assessing disease state is accomplished by collecting data for DNA methylation from samples of known COVID-19 status (COVID-19+ and COVID-19−). The raw data is subjected to QC/normalization using BSC metrics, controls, pOOBAH, and nOOB background correction. Upfront QC is made based on loci detection percentage, detection p-value (sensitivity) and number of probes (+ and − samples). The signature is subjected to supervised machine learning and a classifier generated through iteration with more samples and adjusting weighting of features until accuracy of classification is optimized. An outline of classifier generation is depicted in FIG. 8. Approaches to machine learning are depicted in FIG. 9. Algorithms for machine learning may include linear regression, ElasticNet regression, Ridge regression, LASSO regression, support vector machine (SVM) regression, Random Forest® and XGBoost decision tree algorithms. Results from cross-validation using SVMs as a first analysis, is shown in Table 6. SVM training and testing on COVID-19+ NPS samples and COVID-19− controls, followed by XGBoost training and testing on COVID-19+ and COVID-19− blood samples. From this analysis, it can be concluded that there is a difference in DNA methylation signature between COVID-19+ and COVID-19− samples.

[0128] One skilled in the art will readily appreciate that the present invention is well adapted to carry out the objects and obtain the ends and advantages mentioned, as well as those inherent therein. The present disclosures described herein are presently representative of particular embodiments, are exemplary, and are not intended as limitations on the scope of the invention. Changes therein and other uses will occur to those skilled in the art which are encompassed within the spirit of the invention as defined by the scope of the claims.

TABLE 1
SVM training and testing on the initial 10 COVID-19+ NPS samples plus 164 COVID− controls
(pilot study), followed by XGBoost training and testing on 43 COVID-19+ and 43 COVID-19− blood samples.

| | PooBAH = 0.1 | | PooBAH = 0.2 | | Negative = 0.05 | | | | | | |
|---|---|---|---|---|---|---|---|---|---|---|---|
| | Cross- | Cross- | Cross- | Cross- | Cross- | Cross- | | | | | |
| | valid. 1 | valid. 2 | valid. 1 | valid. 2 | valid. 1 | valid. 2 | COVID+ | COVID+ | COVID+ | COVID+ | # of |
| | accuracy | accuracy | accuracy | accuracy | accuracy | accuracy | partition A | partition A | partition B | partition B | loci |
| L2- | 84.6154 | 91.6667 | 100 | 91.6667 | 100 | 91.6667 | 5 | 8 | 5 | 7 | 776 |
| regularized | | | | | | | | | | | |
| L2 loss SVM | | | | | | | | | | | |
| (dual) | | | | | | | | | | | |
| L2- | 84.6154 | 91.6667 | 92.3077 | 91.6667 | 100 | 91.6667 | 5 | 8 | 5 | 7 | 776 |
| regularized | | | | | | | | | | | |
| L2 loss SVM | | | | | | | | | | | |
| (primal) | | | | | | | | | | | |
| L2- | 84.6154 | 91.6667 | 100 | 91.6667 | 100 | 91.6667 | 5 | 8 | 5 | 7 | 776 |
| regularized | | | | | | | | | | | |
| L1 loss SVM | | | | | | | | | | | |
| (dual) | | | | | | | | | | | |
| XGBoost- | | | | | 99.4 | 98.8 | 43 | 43 | 43 | 43 | 1000 |
| multi: | | | | | | | | | | | |
| softprob- | | | | | | | | | | | |
| mlogloss | | | | | | | | | | | |
| XGBoost- | | | | | 99.4 | 97.1 | 43 | 43 | 43 | 43 | 50000 |
| multi: | | | | | | | | | | | |
| softprob- | | | | | | | | | | | |
| mlogloss | | | | | | | | | | | |

TABLE 2
Methylation coverage before and after customization.

| | | | | Probes/ | Probes/ |
|---|---|---|---|---|---|
| | Genes | Transcripts | Probes | gene | transcript |
| EPIC | 303 | 1,453 | 12,066 | 39.82 | 8.30 |
| EPIC+ | 387 | 1,598 | 62,066 | 160.38 | 38.84 |

TABLE 3
EPIC genome-wide coverage and immune-specific coverage (transcripts
& genes) before and after customization (build = hg38).

| | | | | Whole | | | Immune | |
|---|---|---|---|---|---|---|---|---|
| | | | | Genome | | | Response | |
| | Genomic | Genomic | | Average | Median | | Average | Median |
| | Feature | Class | Total | Probes | Probes | Total | Probes | Probes |
| EPIC | Transcript | Body* | 88,165 | 16.8 | 10 | 1,333 | 22.2 | 13 |
| | | TSS1500** | 83,411 | 5 | 4 | 1,606 | 6.8 | 4 |
| | | TSS200† | 70,149 | 2.7 | 2 | 1,262 | 2.8 | 2 |
| | Gene | Body* | 18,586 | 20.1 | 11 | 259 | 27.7 | 16 |
| | | TSS1500** | 20,992 | 7.3 | 5 | 281 | 16.1 | 7 |
| | | TSS200† | 16,530 | 5.4 | 4 | 237 | 7.9 | 5 |
| EPIC+ | Transcript | Body* | 5,935 | 7.3 | 1 | 966 | 36.3 | 22.5 |
| | | TSS1500** | 1,299 | 12.6 | 10 | 1,135 | 14.2 | 12 |
| | | TSS200† | 852 | 4.5 | 3 | 844 | 4.5 | 3 |
| | Gene | Body* | 1,387 | 6.5 | 1 | 163 | 42.4 | 23 |
| | | TSS1500** | 331 | 21.5 | 8 | 218 | 31.6 | 16 |
| | | TSS200† | 175 | 11.8 | 7 | 169 | 12.2 | 7 |

*Body = the whole gene body;
**TSS1500-201-1500 base pairs upstream of the transcription start site for each transcript;
†TSS200 = 1-200 base pairs upstream of the transcription start site for each transcript.

TABLE 4
XGBoost training and testing on 43 COVID+ cases and 43 COVID− controls.

| | Negative = 0.05 | | COVID+ | COVID− | COVID+ | COVID− | |
|---|---|---|---|---|---|---|---|
| | Cross-valid. 1 | Cross-valid. 2 | samples | samples | samples | samples | Number |
| | accuracy | accuracy | partition A | partition A | partition B | partition B | of loci |
| L2-regularized | 93.6842 | 95.7447 | 5 | 90 | 5 | 89 | 10000 |
| L2 loss SVM | | | | | | | |
| (dual) | | | | | | | |
| L2-regularized | 94.7368 | 95.7447 | 5 | 90 | 5 | 89 | 10000 |
| L2 loss SVM | | | | | | | |
| (primal) | | | | | | | |

TABLE 5
Maximum throughput for Illumina Infinium
HTS custom methylation COVID-19 panel

| Maximum | Monthly per | Yearly per | Monthly per | Yearly per |
|---|---|---|---|---|
| Throughput | 2 iScan | 2 iScan | 4 iScan | 4 iScan |
| Samples | 30,400 | 364,800 | 60,000 | 720,000 |

TABLE 6
SVM training and testing on the known COVID-19+ samples and COVID−
controls, followed by training and testing on COVID-19+ cases and COVID-19− controls.

| | PooBAH = 0.1 | | PooBAH = 0.2 | | Negative = 0.05 | | | | | | |
|---|---|---|---|---|---|---|---|---|---|---|---|
| | Cross- | Cross- | Cross- | Cross- | Cross- | Cross- | | | | | |
| | valid. 1 | valid. 2 | valid. 1 | valid. 2 | valid. 1 | valid. 2 | COVID+ | COVID+ | COVID+ | COVID+ | # of |
| | accuracy | accuracy | accuracy | accuracy | accuracy | accuracy | partition A | partition A | partition B | partition B | loci |
| L2- | 84.6154 | 91.6667 | 100 | 91.6667 | 100 | 91.6667 | 5 | 8 | 5 | 7 | 776 |
| regularized | | | | | | | | | | | |
| L2 loss SVM | | | | | | | | | | | |
| (dual) | | | | | | | | | | | |
| L2- | 84.6154 | 91.6667 | 92.3077 | 91.6667 | 100 | 91.6667 | 5 | 8 | 5 | 7 | 776 |
| regularized | | | | | | | | | | | |
| L2 loss SVM | | | | | | | | | | | |
| (primal) | | | | | | | | | | | |
| L2- | 84.6154 | 91.6667 | 100 | 91.6667 | 100 | 91.6667 | 5 | 8 | 5 | 7 | 776 |
| regularized | | | | | | | | | | | |
| L1 loss SVM | | | | | | | | | | | |
| (dual) | | | | | | | | | | | |
| L2- | | | | | 93.6482 | 95.7447 | 5 | 90 | 5 | 89 | 10000 |
| regularized | | | | | | | | | | | |
| L2 loss SVM | | | | | | | | | | | |
| (primal) | | | | | | | | | | | |
| L2- | | | | | 94.7368 | 95.7447 | 5 | 90 | 5 | 89 | 10000 |
| regularized | | | | | | | | | | | |
| L1 loss SVM | | | | | | | | | | | |
| (dual) | | | | | | | | | | | |

1. A method of assaying for presence of a viral infection or determining the nature of a viral infection in a subject, the method comprising:
obtaining a methylation pattern for a set of DNA methylation sites from a sample derived from the subject; and
analyzing the methylation pattern for the set of DNA methylation sites with an infection positive methylation classifier and/or an infection negative methylation classifier,
wherein presence of a viral infection in the subject is indicated when a score derived from the infection positive classifier exceeds a cutoff and/or threshold value indicating the presence of a viral infection.

2. The method of claim 1, wherein the viral infection is a SARS-CoV-2 infection.

3. The method of claim 2, wherein the SARS-CoV-2 infection causes COVID-19.

4. (canceled)

5. (canceled)

6. The method of claim 1, wherein obtaining the methylation pattern for the set of DNA methylation sites is performed on a methylation bead array.

7. The method of claim 6, wherein the methylation bead array comprises a set of genes comprising ANLN, ARID3B, ARID5B, CALHM2, CBX3B2, CD38, CHSY1 CMPK2, DDX60, DTX3L, EPSTI1, FAM38A, FGFRL1, GPX1, GTPBP2, IFI27, IFIT3, IRF7, LINC00428, LINC01429, MX1, OAS1, OAS2, PARP9, PHOSPHO1, PPL, RAB40C, REPD, TNFRSF8, TRIM22, TSEN15, and ZDHHC6, or any subset thereof.

8. The method of claim 1, wherein analyzing the methylation pattern for the set of DNA methylation sites with an infection positive methylation classifier and/or an infection negative methylation classifier comprises analyzing methylation of a set of genes comprising ANLN, ARID3B, ARID5B, CALHM2, CBX3B2, CD38, CHSY1 CMPK2, DDX60, DTX3L, EPSTI1, FAM38A, FGFRL1, GPX1, GTPBP2, IFI27, IFIT3, IRF7, LINC00428, LINC01429, MX1, OAS1, OAS2, PARP9, PHOSPHO1, PPL, RAB40C, REPD, TNFRSF8, TRIM22, TSEN15, and ZDHHC6, or any subset thereof.

9. The method of claim 8, wherein an infection positive methylation signature comprises hypomethylation of one or more genes selected from a group consisting of IFR7, ARID5B, ANLN, PARP9, MX1, CBX3P2, EPSTI1, CHSY1, MX1, and GPX1, or any subset thereof, and/or hypermethylation of one or more genes selected from a group consisting of LINC01429, CALHM2, LINC00428, OAS1, RAB40C, TSEN15, PEPD, PPL, ARID3B, ZDHHC6, TNFRSF8, DDX60, OAS2, and FGFRL1, or any subset thereof.

10. The method of claim 9, wherein the infection positive methylation signature comprises hypomethylation of IFR7.

11. A method for determining likelihood of a viral infection producing acute respiratory distress syndrome in a subject comprising:
obtaining a methylation pattern for a set of DNA methylation sites from a sample derived from the subject; and
analyzing the methylation pattern for the set of DNA methylation sites with an acute respiratory distress syndrome positive methylation classifier and/or an acute respiratory distress syndrome negative methylation classifier,
wherein likelihood the subject will exhibit acute respiratory distress syndrome is indicated when a score derived from the acute respiratory distress syndrome positive classifier exceeds a cutoff and/or threshold value indicating likelihood of a viral infection producing acute respiratory distress syndrome.

12. The method of claim 11, wherein the viral infection is a SARS-CoV-2 infection.

13. The method of claim 12, wherein the SARS-CoV-2 infection causes COVID-19.

14. (canceled)

15. (canceled)

16. The method of claim 11, wherein obtaining the methylation pattern for the set of DNA methylation sites is performed on a methylation bead array.

17. The method of claim 16, wherein the methylation bead array comprises a set of genes comprising ANLN, ARID3B, ARID5B, CALHM2, CBX3B2, CD38, CHSY1 CMPK2, DDX60, DTX3L, EPSTI1, FAM38A, FGFRL1, GPX1, GTPBP2, IFI27, IFIT3, IRF7, LINC00428, LINC01429, MX1, OAS1, OAS2, PARP9, PHOSPHO1, PPL, RAB40C, REPD, TNFRSF8, TRIM22, TSEN15, and ZDHHC6, or any subset thereof.

18. The method of claim 11, wherein analyzing the methylation pattern for the set of DNA methylation sites with an infection positive methylation classifier and/or an infection negative methylation classifier comprises analyzing methylation of a set of genes comprising ANLN, ARID3B, ARID5B, CALHM2, CBX3B2, CD38, CHSY1 CMPK2, DDX60, DTX3L, EPSTI1, FAM38A, FGFRL1, GPX1, GTPBP2, IFI27, IFIT3, IRF7, LINC00428, LINC01429, MX1, OAS1, OAS2, PARP9, PHOSPHO1, PPL, RAB40C, REPD, TNFRSF8, TRIM22, TSEN15, and ZDHHC6, or any subset thereof.

19. The method of claim 18, wherein an acute respiratory distress syndrome positive methylation signature comprises hypomethylation of one or more genes selected from a group consisting of IFR7, ARID5B, ANLN, PARP9, MX1, CBX3P2, EPSTI1, CHSY1, MX1, and GPX1, or any subset thereof, and/or hypermethylation of one or more genes selected from a group consisting of LINC01429, CALHM2, LINC00428, OAS1, RAB40C, TSEN15, PEPD, PPL, ARID3B, ZDHHC6, TNFRSF8, DDX60, OAS2, and FGFRL1, or any subset thereof.

20. The method of claim 19, wherein the infection positive methylation signature comprises hypomethylation of IFR7.

21-28. (canceled)

29. A computer-implemented method for executing the method of claim 1.

30. (canceled)

31. A method of treating a disorder selected from COVID-19, acute respiratory distress syndrome (ARDS), or multisystem inflammatory syndrome in children (MIS-C), in a subject comprising:
obtaining a methylation pattern for a set of DNA methylation sites from a sample derived from the subject suspected of having the disorder;
analyzing the methylation pattern for the following:
(a) the set of DNA methylation sites with a SARS-CoV-2 positive methylation classifier and/or a SARS-CoV-2 negative methylation classifier, wherein presence of a SARS-CoV-2 infection in the subject is indicated when a score derived from the SARS-CoV-2 positive methylation classifier exceeds a cutoff and/or threshold value indicating presence of a SARS-CoV-2 infection, and treating the subject for COVID-19 if the presence of a SARS-CoV-2 infection in the subject is indicated;
(b) the set of DNA methylation sites to an ARDS positive methylation classifier and/or an ARDS negative methylation classifier, wherein likelihood the subject will exhibit acute respiratory distress syndrome is indicated when a score derived from the ARDS positive classifier exceeds a cutoff and/or threshold value indicating likelihood of a COVID-19 infection producing ARDS, and treating the subject for ARDS; or
(c) the set of DNA methylation sites to an MIS-C positive methylation classifier and/or an MIS-C negative methylation classifier, wherein likelihood the subject will exhibit MIS-C is indicated when a score derived from the MIS-C positive classifier exceeds a cutoff and/or threshold value indicating likelihood of a COVID-19 infection producing MIS-C, and treating the subject for MIS-C.

32-45. (canceled)

46. The method of claim 31, wherein the ARDS positive methylation signature comprises hypomethylation of IFR7.

47-55. (canceled)

56. An array for detecting the presence of a respiratory virus in a sample or a clinical outcome of a respiratory viral infection in a patient comprising a plurality of oligonucleotide probes attached to a solid support; wherein the plurality of oligonucleotide probes detect a methylation signature of the sample or from the patient.

57. (canceled)

58. The array of claim 56, wherein the methylation signature comprises detecting a methylation status of at least one gene selected from the group consisting of: A_24_P561165, AA455656, ABCF1, ACBD5, AGL, AGPAT1, AID, AIF1, AIM2, ANLN, ANKRD28, APE1, APOBEC3G, APOL2, APOL3, APOL6, APPBP2, ARID3B, ARID5B, ASK1, ASPM, ATAT1, ATF2, ATP2C1, B2M, BATF, BATF2, BCL2L14, BRD2, C10orf81, C1orf68, C1R, C1S, C2, C3, C4A, C4B, C5, C6, C6orf136, C6orf15, C7, C8, C9, CALHM2, CALR, CASP1, Caspase-3, Caspase-8, CATSPER2, CATSPER2P1, CATSPERG, CBX3B2, CCDC66, CCHCR1, CCRL1, CD19, CD27-AS1, CD4, CD38, CD40, CD74, CD8, CDKN1A, CELF4, CEP162, CFB, CFH, CFHR1, CFHR2, CFHR3, CFHR4, CHSY1, CHTOP, CIITA, CIITA BX117479, c-Jun, CLIC5, CMPK2, CSNK2B, CTNND1, CTSS ZBP1, CUTA, CX3CL1 A_24_P912985, CXCL10, CXCL11, CXCL2, CYP21A2, DAG1, DDR1, DDX60, DENND2B, DEXI, DTNB, DTX3L, DYSF, E2F5, EGFL8, EHMT2, eIF-2, eIF2B, ELAVL2, EPSTI1, ERP27, ETV7, FADD, FAM26F, FAM38A, FAM49B, FGFRL1 GPX1, FKBP5, FLG, FLG-AS1, FRMD3, FZD5, GAPVD1, GPANK1, GPX5, GTPBP2, GTF2H4, HCG17, HCG18, HCG20, HCG22, HCG24, HCG25, HCG27, HCG4, HCG4B, HCP5, HCP5 NNMT, HLA-A, HLA-B, HLA-C, HLA-DMB, HLA-DOA, HLA-DPA1, HLA-DPB1, HLA-DPB2, HLA-DQA1, HLA-DQA2, HLA-DQB1, HLA-DQB1-AS1, HLA-DRA, HLA-DRB3, HLA-DRB4, HLA-DRB5, HLA-E, HLA-F, HLA-F-AS1, HLA-G, HLA-H, HLA-V, HRNR, HSD17B8, HSPA1B, ICAM1, IFI16, IFI27, IFI35, IFI44, IFI44L, IFIH1, IFIT2, IFIT3, IFIT5, IFITM1, IFNL1, IFNL2, IFNL3, IFNL4, IFN-α, IFN-β, IFNγ, IFN-γ, IFN-ε, IFN-κ, IFN-ω, IGH, IGK, IGL, IKK-α, IKK-β, IKK-γ, IKK-ε, IL-10, IL-11, IL-12, IL12A, IL-13, IL-15, IL-17, IL-18, IL18BP, IL-1ra, IL-1α, IL-1β, IL-2, IL-3, IL-33, IL-36ra, IL-36α, IL-36β, IL-36γ, IL-37, IL-38, IL-4, IL-5, IL-6, IL-7, IL-8, IL-9, IRF1, IRF3, IRF7, IVL, JAK2, JNK, KCTD16, KDM4C, KIFC1, KPRP, LAP3, LCE1D, LCE1E, LCE2B, LCE2C, LCE2D, LCE3C, LCE4A, LELP1, LGP2, LINC00302, LINC00428, LINC01429, LINC01185, LOC100129636, LOC100294145, LOC100507547, LOC101929006, LOC105375690, LRBA, LST1, LTA, LTBR, LT-α, LY6G6F-LY6G6D, LYRM4-AS1, M27126, MAVS, MCCD1, MDA5, MDC1, MEF2C, MEKK1, MICA, MICA-AS1, MICAB, MICB, MICB-DT, MIR219A1, MIR4479, MKK7, MMP25, MOG, MPIG6B, MSH5, MUCL3, MX1, NA, NAIP, NBPF18P, NELFE, NFKB1, NFKB2, NFKBIA, NLRC3, NLRC4, NLRC5, NLRP1, NLRP10, NLRP11, NLRP12, NLRP13, NLRP14, NLRP2, NLRP3, NLRP4, NLRP5, NLRP6, NLRP7, NLRP8, NLRP9, NLRX1, NMI, NOD1, NOD2, NRCAM, OAS1, OAS2, OR10C1, OR12D2, OR14J1, OR2H1, OR2H2, OR2J1, OR2J2, OSMR, PARP9, PCDH15, PDCD6IPP2, PDIA3, PGLYRP4, PHF1, PHOSPH01; PKR, PMAIP1, PML, POMC, PPL, PPP1R11, PPP2R5A, PPP6R3, PPT2, PRR3, PRR9, PRRC2A, PRRT1, PSMB8, PSMB8-AS1, PSMB9, PSORS1C1, PSORS1C2, RAB40C, RALYL, REC8, REL, RELA, RELB, REPD TNFRSF8, RIG-1, RING1, RIP, RNAse L, RNF43, RNF5, RNF5P1, RPL13A, RPS18, RPS6KC1, RTP4, RXRB, S100A13, S100A7, S100A8, SAMD9L, SCNN1A, SECTM1, SEPX1, SERPINB7, SERPING1, SHMT1, SKIV2L, SLC44A4, SLCO5A1, SMURF2P1-LRRC37BP1, SNAPC3, SNHG32, SNORD32B, SNX14, SOCS1, SP110, SPRR1A, SPRR1B, SPRR3, SPRR4, SPTLC3, SSTR2, STAT1, STAT4, STOML1, SUN1, SYNGAP1, TAP1, TAP2, TAPBP, TBC1D5, TBK1, TCF19, TGFβ, THRB, TK2, TLR1, TLR10, TLR2, TLR3, TLR4, TLR5, TLR6, TLR7, TLR8, TLR9, TMEM140, TMEM185A, TMEM62, TNF, TNFR1, TNFR2, TNFRSF14, TNFRSF14-AS1, TNFSF10, TNFSF13B, TP53, TPTE2P5, TRA, TRADD, TRAF2, TRAF3, TRB, TRD, TRG, TRIM10, TRIM15, TRIM22, TRIM25, TRIM27, TRIM33, TRIM37, TRIM39, TRIM40, TRIT1, TRPM4, TSBP1, TSBP1-AS1, T TSEN15, UBB, UBE2K, UNG, USPS, VAMPS, VARS2, VEZT, VPS52, WARS, XAF1, XPOT, YY1AP1, ZC3HAV1, ZDHHC6, ZMYND11, ZNF248, ZNF512, ZNF610, and ZNRD1ASP.

59. The array of claim 56, wherein the plurality of oligonucleotide probes comprises at least one sequence selected from the group consisting of SEQ ID NOS:1-7,831.

60. The array of claim 56, wherein the plurality of oligonucleotide probes comprises at least one sequence selected from the group consisting of SEQ ID NOS:42, 48, 49, 56, 60, 152, 153, 154, 155, 156, 160, 161, 170, 174, 175, 176, 192, 195, 196, 205, 206, 207, 208, 209, 210, 211, 217, 219, 220, 221, 222, 235, 255, 294, 295, 298, 299, 300, 310, 315, 322, 329, 330, 331, 337, 602, 607, 608, 668, 669, 677, 678, 738, 750, 751, 756, 757, 761, 762, 769, 770, 773, 776, 777, 779, 829, 830, 842, 843, 846, 847, 855, 856, 857, 858, 860, 864, 869, 870, 877, 882, 904, 905, 916, 922, 923, 924, 925, 933, 942, 943, 959, 964, 965, 966, 969, 981, 982, 999, 1000, 1002, 1003, 1004, 1005, 1035, 1036, 1046, 1047, 1048, 1049, 1062, 1063, 1090, 1095, 1096, 1097, 1122, 1123, 1138, 1145, 1146, 1155, 1156, 1158, 1165, 1173, 1174, 1180, 1181, 1185, 1210, 1211, 1216, 1217, 1219, 1220, 1225, 1237, 1238, 1247, 1248, 1249, 1250, 1254, 1255, 1256, 1259, 1260, 1263, 1270, 1271, 1296, 1297, 1308, 1309, 1312, 1314, 1318, 1319, 1326, 1328, 1329, 1342, 1348, 1405, 1406, 1413, 1414, 1415, 1416, 1433, 1434, 1443, 1444, 1465, 1470, 1476, 1485, 1486, 1487, 1508, 1509, 1510, 1514, 1612, 1613, 1620, 1627, 1638, 1639, 1664, 1665, 1666, 1669, 1670, 1676, 1677, 1684, 1685, 1701, 1712, 1719, 1720, 1721, 1722, 1726, 1727, 1731, 1738, 1740, 1747, 1748, 1852, 1853, 1854, 1939, 2072, 2073, 2075, 2088, 2090, 2171, 2193, 2194, 2434, 2435, 2604, 2676, 2678, 2680, 2681, 2756, 2914, 2915, 2919, 2920, 3180, 3243, 3774, 3775, 3994, 3995, 3996, 3998, 3999, 4000, 4020, 4021, 4030, 4031, 4046, 4103, 4171, 4179, 4184, 4187, 4188, 4225, 4236, 4251, 4253, 4257, 4258, 4259, 4262, 4263, 4272, 4276, 4277, 4278, 4292, 4293, 4313, 4314, 4316, 4317, 4318, 4328, 4329, 4330, 4343, 4344, 4345, 4357, 4358, 4376, 4377, 4384, 4389, 4390, 4402, 4408, 4409, 4410, 4411, 4414, 4415, 4416, 4418, 4419, 4421, 4422, 4426, 4427, 4430, 4439, 4453, 4454, 4456, 4457, 4458, 4479, 4487, 4488, 4491, 4492, 4493, 4494, 4500, 4501, 4518, 4519, 4525, 4526, 4539, 4540, 4555, 4562, 4563, 4564, 4584, 4585, 4586, 4589, 4594, 4595, 4596, 4597, 4615, 4617, 4618, 4619, 4620, 4621, 4622, 4627, 4628, 4629, 4630, 4631, 4632, 4657, 4658, 4661, 4662, 4671, 4673, 4689, 4690, 4691, 4697, 4698, 4716, 4717, 4726, 4727, 4728, 4729, 4731, 4747, 4768, 4773, 4774, 4778, 4779, 4780, 4781, 4782, 4783, 4784, 4785, 4968, 4969, 4976, 4977, 4987, 4993, 4994, 4995, 4999, 5005, 5006, 5020, 5025, 5026, 5027, 5035, 5049, 5050, 5055, 5056, 5158, 5164, 5171, 5172, 5173, 5188, 5189, 5190, 5191, 5192, 5193, 5204, 5206, 5208, 5209, 5210, 5211, 5212, 5213, 5214, 5217, 5219, 5220, 5225, 5232, 5233, 5234, 5235, 5238, 5239, 5240, 5241, 5294, 5295, 5296, 5313, 5316, 5327, 5370, 5375, 5376, 5377, 5378, 5379, 5385, 5507, 5508, 5509, 5510, 5511, 5512, 5513, 5514, 5515, 5516, 5517, 5561, 5572, 5573, 5574, 5577, 5578, 5579, 5585, 5586, 5592, 5645, 5646, 5649, 5650, 5656, 5657, 5667, 5672, 5681, 5684, 5695, 5696, 5697, 5698, 5699, 5700, 5701, 5702, 5710, 5711, 5720, 5725, 5728, 5729, 5730, 5743, 5744, 5745, 5748, 5749, 5759, 5760, 5761, 5765, 5766, 5768, 5769, 5772, 5780, 5781, 5782, 5802, 5803, 5804, 5807, 5808, 5809, 5813, 5814, 5816, 5817, 5828, 5829, 5833, 5910, 5914, 5917, 5937, 5941, 5942, 5944, 5945, 5948, 5949, 5963, 6018, 6019, 6023, 6031, 6032, 6033, 6039, 6040, 6043, 6045, 6109, 6110, 6111, 6112, 6113, 6116, 6127, 6128, 6133, 6134, 6137, 6225, 6236, 6242, 6449, 6450, 6451, 6452, 6453, 6454, 6455, 6457, 6458, 6461, 6462, 6463, 6466, 6469, 6470, 6471, 6480, 6481, 6545, 6546, 6547, 6613, 6684, 6685, 6692, 6693, 6694, 6695, 6710, 6711, 6731, 6732, 6741, 6787, 6788, 6805, 6806, 6807, 6828, 6829, 6830, 6831, 6832, 6835, 6836, 6846, 6847, 6848, 6849, 6850, 6862, 6868, 6869, 6870, 6871, 6878, 6879, 6897, 6898, 6899, 6900, 6908, 6909, 6914, 6938, 6939, 6949, 6950, 6951, 6952, 6959, 6960, 6971, 6972, 6973, 6974, 6976, 6979, 7110, 7111, 7112, 7113, 7117, 7118, 7120, 7122, 7124, 7135, 7184, 7185, 7401, 7402, 7404, 7408, 7441, 7442, 7482, 7490, 7491, 7497, 7500, 7503, 7504, 7513, 7514, 7515, 7525, 7526, 7621, 7622, 7623, 7624, 7625, 7626, 7627, 7638, 7649, 7650, 7651, 7652, 7665, 7694, 7704, 7705, 7708, 7716, 7717, 7718, 7726, 7727, 7728, 7729, 7738, 7739, 7740, 7741, 7742, 7743, 7744, 7746, 7747, 7749, 7757, 7770, 7771, 7774, 7775, 7777, 7783, 7788, 7789, 7790, 7791, 7798, 7799, 7803, 7804, 7815, 7816, 7823, 7824, and 7825.

61. (canceled)

The application's sequence listing, which the Patent Office published only in electronic form, follows.

SEQUENCE LISTING (7831 sequences)

SEQ ID NO: 1 - DNA, 50 bp, Artificial Sequence
  Description of Artificial Sequence: Synthetic probe
ttatttatctccaaaacttatttatattaaaccctaatctccraccactc

SEQ ID NO: 2 - DNA, 50 bp, Artificial Sequence
  Description of Artificial Sequence: Synthetic probe
aaaattaacctaaattaaaactctcctaactttttcctcttaaaacrttc

SEQ ID NO: 3 - DNA, 50 bp, Artificial Sequence
  Description of Artificial Sequence: Synthetic probe
taatccrataccaacccctaattctctcttcctaaaaataaaaacacttc

SEQ ID NO: 4 - DNA, 50 bp, Artificial Sequence
  Description of Artificial Sequence: Synthetic probe
rcaaaactccraattcaatttcccrcrctaaaactttttcaataataaac

SEQ ID NO: 5 - DNA, 50 bp, Artificial Sequence
  Description of Artificial Sequence: Synthetic probe
atcattattaaacatctattttacataataaatatttccaaaaatacctc

SEQ ID NO: 6 - DNA, 50 bp, Artificial Sequence
  Description of Artificial Sequence: Synthetic probe
tcctctaaaccacatacctaaacttctatccccrcaaattacacataacc

SEQ ID NO: 7 - DNA, 50 bp, Artificial Sequence
  Description of Artificial Sequence: Synthetic probe
crattaaataaaaaactaaatctatactatatcttcccaatattccatac

SEQ ID NO: 8 - DNA, 50 bp, Artificial Sequence
  Description of Artificial Sequence: Synthetic probe
aaataactaactctcrtcccataccaatatcttcctaatttaaaattaac

SEQ ID NO: 9 - DNA, 50 bp, Artificial Sequence
  Description of Artificial Sequence: Synthetic probe
taaaaaaaacaaaccttaactctcacccaattaacaaacrtttatccaac

SEQ ID NO: 10 - DNA, 50 bp, Artificial Sequence
  Description of Artificial Sequence: Synthetic probe
caaaaaaaactatcraaacaaacractttaaccaactaatactcrcacrc

SEQ ID NO: 11 - DNA, 50 bp, Artificial Sequence
  Description of Artificial Sequence: Synthetic probe
cctacraacaaccrtatcaatacaaataactaaatactaaataaaacccc

SEQ ID NO: 12 - DNA, 50 bp, Artificial Sequence
  Description of Artificial Sequence: Synthetic probe
acaaccrtatcaatacaaataactaaatactaaataaaaccccrtctccc

SEQ ID NO: 13 - DNA, 50 bp, Artificial Sequence
  Description of Artificial Sequence: Synthetic probe
ccttcctaataaccctaaaatcctacacaaaacctaacratactaatacc

SEQ ID NO: 14 - DNA, 50 bp, Artificial Sequence
  Description of Artificial Sequence: Synthetic probe
tacccraaaaataacaccctaaacccctaaaatctacattctataaaaac

SEQ ID NO: 15 - DNA, 50 bp, Artificial Sequence
  Description of Artificial Sequence: Synthetic probe
aataacrctacctaacaacrcraaaccctaaaaactaaaactctaccctc

SEQ ID NO: 16 - DNA, 50 bp, Artificial Sequence
  Description of Artificial Sequence: Synthetic probe
tctacccaataaactcaatactcccaaatataaaatataaaatccctaac

SEQ ID NO: 17 - DNA, 50 bp, Artificial Sequence
  Description of Artificial Sequence: Synthetic probe
aaaatataaaatccctaacraaaacaaaattccaattcccaaaactccrc

SEQ ID NO: 18 - DNA, 50 bp, Artificial Sequence
  Description of Artificial Sequence: Synthetic probe
cctaacraaaacaaaattccaattcccaaaactccrcrctaccaaacaac

SEQ ID NO: 19 - DNA, 50 bp, Artificial Sequence
  Description of Artificial Sequence: Synthetic probe
tcraaacccactaaatactcrtcctccttacaaaacracaaaactaaaac

SEQ ID NO: 20 - DNA, 50 bp, Artificial Sequence
  Description of Artificial Sequence: Synthetic probe
acttaaaacaacactcraaacccactaaatactcrtcctccttacaaaac

SEQ ID NO: 21 - DNA, 50 bp, Artificial Sequence
  Description of Artificial Sequence: Synthetic probe
cacctacctaaactacacttaaaacaacactcraaacccactaaatactc

SEQ ID NO: 22 - DNA, 50 bp, Artificial Sequence
  Description of Artificial Sequence: Synthetic probe
taacccrccaaaaaactacacctacctaaactacacttaaaacaacactc

SEQ ID NO: 23 - DNA, 50 bp, Artificial Sequence
  Description of Artificial Sequence: Synthetic probe
aaacrtatctaaaaaaataaaattaaaaccccrtaccracaaatataaac

SEQ ID NO: 24 - DNA, 50 bp, Artificial Sequence
  Description of Artificial Sequence: Synthetic probe
aaactccaaaatacaaaaacaacacrttccctcaccaactccccaaaaac

SEQ ID NO: 25 - DNA, 50 bp, Artificial Sequence
  Description of Artificial Sequence: Synthetic probe
aaccccrtaccracaaatataaacrctatatctactcttaaaaattaaac

SEQ ID NO: 26 - DNA, 50 bp, Artificial Sequence
  Description of Artificial Sequence: Synthetic probe
ttacaaaacccacataactctacatataaaaaacattcctaacaaaaaac

SEQ ID NO: 27 - DNA, 50 bp, Artificial Sequence
  Description of Artificial Sequence: Synthetic probe
aaaactcctctcccaaactccaactataaaataaaaatccatactcctac

SEQ ID NO: 28 - DNA, 50 bp, Artificial Sequence
  Description of Artificial Sequence: Synthetic probe
rtcccraactccaaaaacaaatacactcctaaccaacatccaaaataaac

SEQ ID NO: 29 - DNA, 50 bp, Artificial Sequence
  Description of Artificial Sequence: Synthetic probe
aactcrtccaccctaaatactaaccaaaaatacacctacctctaaaactc

SEQ ID NO: 30 - DNA, 50 bp, Artificial Sequence
  Description of Artificial Sequence: Synthetic probe
aattaaaccractataatatacracaccrtcctataaaaccaaacrtccc

SEQ ID NO: 31 - DNA, 50 bp, Artificial Sequence
  Description of Artificial Sequence: Synthetic probe
rtccaccctaaatactaaccaaaaatacacctacctctaaaactcraaac

SEQ ID NO: 32 - DNA, 50 bp, Artificial Sequence
  Description of Artificial Sequence: Synthetic probe
aaaacccraaaacctacaccccaactaaaaaatatacaaccctacaaacc

SEQ ID NO: 33 - DNA, 50 bp, Artificial Sequence
  Description of Artificial Sequence: Synthetic probe
caaaaccracctacaaaactacacactttctaattaaaatacaaatcccc

SEQ ID NO: 34 - DNA, 50 bp, Artificial Sequence
  Description of Artificial Sequence: Synthetic probe
aattcctataactaaccaccctaccaactctcctacaaataaaaataaac

SEQ ID NO: 35 - DNA, 50 bp, Artificial Sequence
  Description of Artificial Sequence: Synthetic probe
ctactactaaacrtaatacaatcaataaaaacccaaatctatcacrcacc

SEQ ID NO: 36 - DNA, 50 bp, Artificial Sequence
  Description of Artificial Sequence: Synthetic probe
caaacrataccaaaaaaaataactaaaacctactctaaacaaacacaaac

SEQ ID NO: 37 - DNA, 50 bp, Artificial Sequence
  Description of Artificial Sequence: Synthetic probe
acaaacacaaacratacrtaacaaacctaaacttccattaactacatcac

SEQ ID NO: 38 - DNA, 50 bp, Artificial Sequence
  Description of Artificial Sequence: Synthetic probe
crtcacrtaaatcacraaattccatataatacaaaaaacraaaccrtcac

SEQ ID NO: 39 - DNA, 50 bp, Artificial Sequence
  Description of Artificial Sequence: Synthetic probe
acaaaacctaataataaaaaaacctccraataaaaacaacccacaatccc

SEQ ID NO: 40 - DNA, 50 bp, Artificial Sequence
  Description of Artificial Sequence: Synthetic probe
actcactaatacctaccttaaaactccraaactataaactatctccatcc

SEQ ID NO: 41 - DNA, 50 bp, Artificial Sequence
  Description of Artificial Sequence: Synthetic probe
aaaacaaaatccacaaaaaaaccraacraaactaacaaccttcccaatcc

SEQ ID NO: 42 - DNA, 50 bp, Artificial Sequence
  Description of Artificial Sequence: Synthetic probe
aacaaaatccacaaaaaaaccraacraaactaacaaccttcccaatccrc

SEQ ID NO: 43 - DNA, 50 bp, Artificial Sequence
  Description of Artificial Sequence: Synthetic probe
atacratctaaccaatttcaatcataaacccaccaaacctatatccctac

SEQ ID NO: 44 - DNA, 50 bp, Artificial Sequence
  Description of Artificial Sequence: Synthetic probe
cttctactaaacaaaataaacttcccttccraataaaaccaccaaaatac

SEQ ID NO: 45 - DNA, 50 bp, Artificial Sequence
  Description of Artificial Sequence: Synthetic probe
tcacrcaaaaacacaaacctaataaatctataactaaaattaaccaaacc

SEQ ID NO: 46 - DNA, 50 bp, Artificial Sequence
  Description of Artificial Sequence: Synthetic probe
aataaatctataactaaaattaaccaaaccrcattctaataattttattc

SEQ ID NO: 47 - DNA, 50 bp, Artificial Sequence
  Description of Artificial Sequence: Synthetic probe
atttcctattcccatctcaacttctactaaacaaaataaacttcccttcc

SEQ ID NO: 48 - DNA, 50 bp, Artificial Sequence
  Description of Artificial Sequence: Synthetic probe
aaaacaaaaaacccacaaaacccctttattcracaaaaatatcaatcaac

SEQ ID NO: 49 - DNA, 50 bp, Artificial Sequence
  Description of Artificial Sequence: Synthetic probe
gggaataggaaatttatagggtttttttattyggtaaaaatgttagttag

SEQ ID NO: 50 - DNA, 50 bp, Artificial Sequence
  Description of Artificial Sequence: Synthetic probe
aaaaaacccacaaaacccctttattcracaaaaatatcaatcaacrcccc

SEQ ID NO: 51 - DNA, 50 bp, Artificial Sequence
  Description of Artificial Sequence: Synthetic probe
taaaaaaacacaaataaactttaaaaaactcccccttctacaaaaaaccc

SEQ ID NO: 52 - DNA, 50 bp, Artificial Sequence
  Description of Artificial Sequence: Synthetic probe
actcaaacctactaaataaaacracrctaaaaaacacaaataaaccctac

SEQ ID NO: 53 - DNA, 50 bp, Artificial Sequence
  Description of Artificial Sequence: Synthetic probe
acccaactaacaaaataaactccaacaaaaaaactcaacrccattactac

SEQ ID NO: 54 - DNA, 50 bp, Artificial Sequence
  Description of Artificial Sequence: Synthetic probe
aatttagttagtaggatgaattttagtagaggaatttagygttattgttg

SEQ ID NO: 55 - DNA, 50 bp, Artificial Sequence
  Description of Artificial Sequence: Synthetic probe
caataacrctaaattcctctactaaaattcatcctactaactaaattccc

SEQ ID NO: 56 - DNA, 50 bp, Artificial Sequence
  Description of Artificial Sequence: Synthetic probe
ctaaattcctctactaaaattcatcctactaactaaattcccraactacc

SEQ ID NO: 57 - DNA, 50 bp, Artificial Sequence
  Description of Artificial Sequence: Synthetic probe
actactcaccccactataataaacccaatactaaaaatctaaattaaccc

SEQ ID NO: 58 - DNA, 50 bp, Artificial Sequence
  Description of Artificial Sequence: Synthetic probe
aataaaataaacaacaaaaccacaaccctacccaacaaacctcctcctac

SEQ ID NO: 59 - DNA, 50 bp, Artificial Sequence
  Description of Artificial Sequence: Synthetic probe
caaaaatacccacatccraccaaataaaaactcaccaactacccrtaaac

SEQ ID NO: 60 - DNA, 50 bp, Artificial Sequence
  Description of Artificial Sequence: Synthetic probe
caaaactaccraaaaattaaatcacctactcraaaaccccrcccaaaaac

SEQ ID NO: 61 - DNA, 50 bp, Artificial Sequence
  Description of Artificial Sequence: Synthetic probe
accraatataaacacttctaaaaactaaatatctctaaacrtctctaaac

SEQ ID NO: 62 - DNA, 50 bp, Artificial Sequence
  Description of Artificial Sequence: Synthetic probe
tatcacctatcaccaaaatcaaaactaccraaaaattaaatcacctactc

SEQ ID NO: 63 - DNA, 50 bp, Artificial Sequence
  Description of Artificial Sequence: Synthetic probe
aaacacttctaaaaactaaatatctctaaacrtctctaaacraaaccctc

SEQ ID NO: 64 - DNA, 50 bp, Artificial Sequence
  Description of Artificial Sequence: Synthetic probe
ccccctactacacactaatcttatcacctatcaccaaaatcaaaactacc

SEQ ID NO: 65 - DNA, 50 bp, Artificial Sequence
  Description of Artificial Sequence: Synthetic probe
acaataaataacaaactaatcaaaaccacatcraaaaaaataactctacc

SEQ ID NO: 66 - DNA, 50 bp, Artificial Sequence
  Description of Artificial Sequence: Synthetic probe
ttttattaggggttttygattgtttattagttagtttaggaaygaggtta

SEQ ID NO: 67 - DNA, 50 bp, Artificial Sequence
  Description of Artificial Sequence: Synthetic probe
caaaaactcacaaaccaaacaataaataacaaactaatcaaaaccacatc

SEQ ID NO: 68 - DNA, 50 bp, Artificial Sequence
  Description of Artificial Sequence: Synthetic probe
aaaaacaaaaacraaccccaaaccaaactcataaaacaaccttaccracc

SEQ ID NO: 69 - DNA, 50 bp, Artificial Sequence
  Description of Artificial Sequence: Synthetic probe
ccraactccaacratcracaaaattattccataaacctaacctaaaaccc

SEQ ID NO: 70 - DNA, 50 bp, Artificial Sequence
  Description of Artificial Sequence: Synthetic probe
ccaaacttaaccccacaacctaaatctccctctatacaataaaaaaaaac

SEQ ID NO: 71 - DNA, 50 bp, Artificial Sequence
  Description of Artificial Sequence: Synthetic probe
aataaatctaaaaaacrtaactaacccaccrtaaccaaaaacataaactc

SEQ ID NO: 72 - DNA, 50 bp, Artificial Sequence
  Description of Artificial Sequence: Synthetic probe
actaacccaccrtaaccaaaaacataaactcraaaacacataccaaaacc

SEQ ID NO: 73 - DNA, 50 bp, Artificial Sequence
  Description of Artificial Sequence: Synthetic probe
aaaatcraaaaattctaaaaacacataaaacctcctaaaacacctaaccc

SEQ ID NO: 74 - DNA, 50 bp, Artificial Sequence
  Description of Artificial Sequence: Synthetic probe
raaacacaacaaccccatcaaccataaacaaaactactctaaaaaaaatc

SEQ ID NO: 75 - DNA, 50 bp, Artificial Sequence
  Description of Artificial Sequence: Synthetic probe
aaaaccraaccaaatatcccaaaaaaccccatatacttccaaaactttcc

SEQ ID NO: 76 - DNA, 50 bp, Artificial Sequence
  Description of Artificial Sequence: Synthetic probe
ygggatatagtagttttattagttatgagtagagttgttttggggaaaat

SEQ ID NO: 77 - DNA, 50 bp, Artificial Sequence
  Description of Artificial Sequence: Synthetic probe
caaacaaaaaaacaccaactaaaaaaactcaaataacccataaaccccac

SEQ ID NO: 78 - DNA, 50 bp, Artificial Sequence
  Description of Artificial Sequence: Synthetic probe
rattttccccaaaacaactctactcataactaataaaactactatatccc

SEQ ID NO: 79 - DNA, 50 bp, Artificial Sequence
  Description of Artificial Sequence: Synthetic probe
ttaagtagggagatattagttaaggggatttaaatggtttatgagtttta

SEQ ID NO: 80 - DNA, 50 bp, Artificial Sequence
  Description of Artificial Sequence: Synthetic probe
taaaccatttaaatccccttaactaatatctccctacttaaactctaaac

SEQ ID NO: 81 - DNA, 50 bp, Artificial Sequence
  Description of Artificial Sequence: Synthetic probe
aaccatttaaatccccttaactaatatctccctacttaaactctaaacrc

SEQ ID NO: 82 - DNA, 50 bp, Artificial Sequence
  Description of Artificial Sequence: Synthetic probe
aaactctaaacrcraataaaataataaataaactcccraaaaaacctccc

SEQ ID NO: 83 - DNA, 50 bp, Artificial Sequence
  Description of Artificial Sequence: Synthetic probe
aaacctcccrcaaacttacraaattcccactctctaaacracaaattatc

SEQ ID NO: 84 - DNA, 50 bp, Artificial Sequence
  Description of Artificial Sequence: Synthetic probe
acraaattcccactctctaaacracaaattatcrtataaaaaaaacctac

SEQ ID NO: 85 - DNA, 50 bp, Artificial Sequence
  Description of Artificial Sequence: Synthetic probe
atataaatacctaaaaaacaaaattcacacactatacccrtcaactcccc

SEQ ID NO: 86 - DNA, 50 bp, Artificial Sequence
  Description of Artificial Sequence: Synthetic probe
taaaataaacaatataaatacctaaaaaacaaaattcacacactataccc

SEQ ID NO: 87 - DNA, 50 bp, Artificial Sequence
  Description of Artificial Sequence: Synthetic probe
aaatatctacaataccaaatatataacccaaataaaaaaccaacacaacc

SEQ ID NO: 88 - DNA, 50 bp, Artificial Sequence
  Description of Artificial Sequence: Synthetic probe
taagtgtttgtagtgttaaatgtgtgatttaggtaagaggttagtatagt

SEQ ID NO: 89 - DNA, 50 bp, Artificial Sequence
  Description of Artificial Sequence: Synthetic probe
gtgttaaatgtgtgatttaggtaagaggttagtatagtyggtttagtttt

SEQ ID NO: 90 - DNA, 50 bp, Artificial Sequence
  Description of Artificial Sequence: Synthetic probe
aaaaacraaaaataaaaatcaatcrccaaactcaaaataacccacctaac

SEQ ID NO: 91 - DNA, 50 bp, Artificial Sequence
  Description of Artificial Sequence: Synthetic probe
tatctcacctctcactttatcaccrccaaataaaccatcctaaacttaac

SEQ ID NO: 92 - DNA, 50 bp, Artificial Sequence
  Description of Artificial Sequence: Synthetic probe
cactttacaactaaaaacrtaaacacaaaaaaaatctaaacacccacccc

SEQ ID NO: 93 - DNA, 50 bp, Artificial Sequence
  Description of Artificial Sequence: Synthetic probe
ttaactcctctaatacccraaataaatacccaaacctctcctatacccac

SEQ ID NO: 94 - DNA, 50 bp, Artificial Sequence
  Description of Artificial Sequence: Synthetic probe
acataaaactccaaaaaaacaaaaccrttaaccrcataaacaaactctac

SEQ ID NO: 95 - DNA, 50 bp, Artificial Sequence
  Description of Artificial Sequence: Synthetic probe
ccaaacccaaaaataacctttaaatcactaaacrcaaaacctatccatac

SEQ ID NO: 96 - DNA, 50 bp, Artificial Sequence
  Description of Artificial Sequence: Synthetic probe
attagatttagaggtggtttttgagttattgagygtagagtttgtttatg

SEQ ID NO: 97 - DNA, 50 bp, Artificial Sequence
  Description of Artificial Sequence: Synthetic probe
caaaaataacctttaaatcactaaacrcaaaacctatccatacraccaac

SEQ ID NO: 98 - DNA, 50 bp, Artificial Sequence
  Description of Artificial Sequence: Synthetic probe
aaaacactaaccatactaaacctaacataaaactccaaaaaaacaaaacc

SEQ ID NO: 99 - DNA, 50 bp, Artificial Sequence
  Description of Artificial Sequence: Synthetic probe
ctatccccttaaaacctcataccaaactcaacataaccaatactccctac

SEQ ID NO: 100 - DNA, 50 bp, Artificial Sequence
  Description of Artificial Sequence: Synthetic probe
caaactcaacataaccaatactccctacraccaaacaaaactacacctac

SEQ ID NO: 101 - DNA, 50 bp, Artificial Sequence
  Description of Artificial Sequence: Synthetic probe
acctctaccattaaaataacctaatttacacaaataaaaaacccrtttac

SEQ ID NO: 102 - DNA, 50 bp, Artificial Sequence
  Description of Artificial Sequence: Synthetic probe
rccraacttacactatcaattccaaaacaaaatcccrcaaacaaatcctc

SEQ ID NO: 103 - DNA, 50 bp, Artificial Sequence
  Description of Artificial Sequence: Synthetic probe
caaataaacaaaacrccraacttacactatcaattccaaaacaaaatccc

SEQ ID NO: 104 - DNA, 50 bp, Artificial Sequence
  Description of Artificial Sequence: Synthetic probe
aacraaaacctacctacraaaccctaccctaaaactaacaatacaaactc

SEQ ID NO: 105 - DNA, 50 bp, Artificial Sequence
  Description of Artificial Sequence: Synthetic probe
aacttcrttaataaaaaaaaccaaccttctacccaaataaacaaaacrcc

SEQ ID NO: 106 - DNA, 50 bp, Artificial Sequence
  Description of Artificial Sequence: Synthetic probe
aaaaacttcrttaataaaaaaaaccaaccttctacccaaataaacaaaac

SEQ ID NO: 107 - DNA, 50 bp, Artificial Sequence
  Description of Artificial Sequence: Synthetic probe
raaaacctacctacraaaccctaccctaaaactaacaatacaaactcrac

SEQ ID NO: 108 - DNA, 50 bp, Artificial Sequence
  Description of Artificial Sequence: Synthetic probe
aaactcracrtcctacccatctaaacaaaaaactaatttctcccatcaac

SEQ ID NO: 109 - DNA, 50 bp, Artificial Sequence
  Description of Artificial Sequence: Synthetic probe
ccatccacraaccaaaacaacatccacaaaccaaaaactactaccaaaac

SEQ ID NO: 110 - DNA, 50 bp, Artificial Sequence
  Description of Artificial Sequence: Synthetic probe
tacctctaaacacctcrtttaactaaaccaaaaattcaacctaacaaaac

SEQ ID NO: 111 - DNA, 50 bp, Artificial Sequence
  Description of Artificial Sequence: Synthetic probe
attatttaygggttaggatagtatttataggttaaggattgttgttaggg

SEQ ID NO: 112 - DNA, 50 bp, Artificial Sequence
  Description of Artificial Sequence: Synthetic probe
aacaaaacrccctaacaacaatccttaacctataaatactatcctaaccc

SEQ ID NO: 113 - DNA, 50 bp, Artificial Sequence
  Description of Artificial Sequence: Synthetic probe
acaacaatccttaacctataaatactatcctaacccrtaaataatatccc

SEQ ID NO: 114 - DNA, 50 bp, Artificial Sequence
  Description of Artificial Sequence: Synthetic probe
cttaacctataaatactatcctaacccrtaaataatatcccracctccac

SEQ ID NO: 115 - DNA, 50 bp, Artificial Sequence
  Description of Artificial Sequence: Synthetic probe
ataacctaaactacaaccacacacracrttctctatcctaaaacaattcc

SEQ ID NO: 116 - DNA, 50 bp, Artificial Sequence
  Description of Artificial Sequence: Synthetic probe
taatccccrtcctaaacratacaaaaataacctaaactacaaccacacac

SEQ ID NO: 117 - DNA, 50 bp, Artificial Sequence
  Description of Artificial Sequence: Synthetic probe
ccaaaacaaaaaacrccrtatataactacaacccaaaccacttctacatc

SEQ ID NO: 118 - DNA, 50 bp, Artificial Sequence
  Description of Artificial Sequence: Synthetic probe
ataactacaacccaaaccacttctacatcrtccaaaacraaaaccactac

SEQ ID NO: 119 - DNA, 50 bp, Artificial Sequence
  Description of Artificial Sequence: Synthetic probe
aaacccctaaacaaaccataccrtcraaaaaacctaaaactccaaacaac

SEQ ID NO: 120 - DNA, 50 bp, Artificial Sequence
  Description of Artificial Sequence: Synthetic probe
aactaaccaaaattctatctcaccaaaacccctaaacaaaccataccrtc

SEQ ID NO: 121 - DNA, 50 bp, Artificial Sequence
  Description of Artificial Sequence: Synthetic probe
aaatctcataaatccraaaatccctctatatccacatcctacaatactac

SEQ ID NO: 122 - DNA, 50 bp, Artificial Sequence
  Description of Artificial Sequence: Synthetic probe
taaaaaaaataaatatccaaccctaacctacatctaaccraacaaccccc

SEQ ID NO: 123 - DNA, 50 bp, Artificial Sequence
  Description of Artificial Sequence: Synthetic probe
ataataactctaactatcccraccttaaataactaaaatctcataaatcc

SEQ ID NO: 124 - DNA, 50 bp, Artificial Sequence
  Description of Artificial Sequence: Synthetic probe
atctataaacttctaaacctaaatactctacraataataaaaaaaccaac

SEQ ID NO: 125 - DNA, 50 bp, Artificial Sequence
  Description of Artificial Sequence: Synthetic probe
taacractaaaaactacttatctataaacttctaaacctaaatactctac

SEQ ID NO: 126 - DNA, 50 bp, Artificial Sequence
  Description of Artificial Sequence: Synthetic probe
acccrtaaaacacccaaatctaaaaactcacaaacaaacaatccctaacc

SEQ ID NO: 127 - DNA, 50 bp, Artificial Sequence
  Description of Artificial Sequence: Synthetic probe
tattygtagagtatttaggtttagaagtttatagataagtagtttttagt

SEQ ID NO: 128 - DNA, 50 bp, Artificial Sequence
  Description of Artificial Sequence: Synthetic probe
aaaaaaaaaatccccraaaaacaattctaacacaaaatatcctaactctc

SEQ ID NO: 129 - DNA, 50 bp, Artificial Sequence
  Description of Artificial Sequence: Synthetic probe
cccaataaaaccctaaaaaaatatcaacaccaaaccaaataaataaaccc

SEQ ID NO: 130 - DNA, 50 bp, Artificial Sequence
  Description of Artificial Sequence: Synthetic probe
aaataaacccraaaaaaacccaactctataccctaaaaaaaaaactccac

SEQ ID NO: 131 - DNA, 50 bp, Artificial Sequence
  Description of Artificial Sequence: Synthetic probe
ccaaaataccrctcaaaataaaaccttcaaacctttctactaaaaaaaac

SEQ ID NO: 132 - DNA, 50 bp, Artificial Sequence
  Description of Artificial Sequence: Synthetic probe
actctataccctaaaaaaaaaactccacrttacttccctaaaaaataacc

SEQ ID NO: 133 - DNA, 50 bp, Artificial Sequence
  Description of Artificial Sequence: Synthetic probe
aaaaataaccrtcttctccaacaaaaaaacttaaaaatcccaccctaaac

SEQ ID NO: 134 - DNA, 50 bp, Artificial Sequence
  Description of Artificial Sequence: Synthetic probe
aaaaaaattatctaaaacacacaaacttcaaccctacaactctcctaaac

SEQ ID NO: 135 - DNA, 50 bp, Artificial Sequence
  Description of Artificial Sequence: Synthetic probe
tagaaaggtttgaaggttttattttgagyggtattttggttatatgtttg

SEQ ID NO: 136 - DNA, 50 bp, Artificial Sequence
  Description of Artificial Sequence: Synthetic probe
aaaaaaacttaaaaatcccaccctaaacracaccctaatcacatacctac

SEQ ID NO: 137 - DNA, 50 bp, Artificial Sequence
  Description of Artificial Sequence: Synthetic probe
aatctcaaatcaattaaaaacccaaaatcaacatttaaaaatatcctccc

SEQ ID NO: 138 - DNA, 50 bp, Artificial Sequence
  Description of Artificial Sequence: Synthetic probe
aactaacctaaaacttcaaaacttcttaaaaaaaactaaaatcccccaac

SEQ ID NO: 139 - DNA, 50 bp, Artificial Sequence
  Description of Artificial Sequence: Synthetic probe
taacaactccaaaataaaacctcaaaaatctatctaacttttccaaactc

SEQ ID NO: 140 - DNA, 50 bp, Artificial Sequence
  Description of Artificial Sequence: Synthetic probe
aaactccctaaaactaaataaacactaaacrctacacctacctctcccac

SEQ ID NO: 141 - DNA, 50 bp, Artificial Sequence
  Description of Artificial Sequence: Synthetic probe
aaaaaaaccaccatacccaataaaaactactaatcccaactccraccttc

SEQ ID NO: 142 - DNA, 50 bp, Artificial Sequence
  Description of Artificial Sequence: Synthetic probe
ctccctaaaaaaaaccaccatacccaataaaaactactaatcccaactcc

SEQ ID NO: 143 - DNA, 50 bp, Artificial Sequence
  Description of Artificial Sequence: Synthetic probe
ctaaaaccaacaactcccactaaatataataatttctctcaaaaaacctc

SEQ ID NO: 144 - DNA, 50 bp, Artificial Sequence
  Description of Artificial Sequence: Synthetic probe
caaactcacactaaatttctttaatatcctctataatatactcctttacc

SEQ ID NO: 145 - DNA, 50 bp, Artificial Sequence
  Description of Artificial Sequence: Synthetic probe
ctctaacctaacactacrtcrctaacttaaaaacaaataacratccctac

SEQ ID NO: 146 - DNA, 50 bp, Artificial Sequence
  Description of Artificial Sequence: Synthetic probe
atctatcrattaaaatcctacttttacataacrcccccacaatacccttc

SEQ ID NO: 147 - DNA, 50 bp, Artificial Sequence
  Description of Artificial Sequence: Synthetic probe
aactaactatcattcrcttattctttccaaaacacacttacaaaaaaaac

SEQ ID NO: 148 - DNA, 50 bp, Artificial Sequence
  Description of Artificial Sequence: Synthetic probe
aaaaaatacraaaaactaaacracaaaacttaaaccacrcrtcccctacc

SEQ ID NO: 149 - DNA, 50 bp, Artificial Sequence
  Description of Artificial Sequence: Synthetic probe
acaatacaaaatatactttattaaacaaatacttaaaaacaacatactca

SEQ ID NO: 150 - DNA, 50 bp, Artificial Sequence
  Description of Artificial Sequence: Synthetic probe
ataaacaaataaacaaaaatctctaattttcctaaacaaaaaaccctaca

SEQ ID NO: 151 - DNA, 50 bp, Artificial Sequence
  Description of Artificial Sequence: Synthetic probe
acaaacatactaccttcaaacatctatttaacaaaacacatcttacacca

SEQ ID NO: 152 - DNA, 50 bp, Artificial Sequence
  Description of Artificial Sequence: Synthetic probe
tatattaygttatgtaaatgaggtggttagatagattaatttaaaggttt

SEQ ID NO: 153 - DNA, 50 bp, Artificial Sequence
  Description of Artificial Sequence: Synthetic probe
atattacrtcatacaaataaaataactaaacaaaccaatccaaaaacccc

SEQ ID NO: 154 - DNA, 50 bp, Artificial Sequence
  Description of Artificial Sequence: Synthetic probe
agatgggtatttttatgtaaggtatgagttgtttaagtgtatggagattt

SEQ ID NO: 155 - DNA, 50 bp, Artificial Sequence
  Description of Artificial Sequence: Synthetic probe
aataaatacccttatacaaaatataaactactcaaatacataaaaacccc

SEQ ID NO: 156 - DNA, 50 bp, Artificial Sequence
  Description of Artificial Sequence: Synthetic probe
gttaataggattttatattygtttttagaggaatttggagagggtttgtg

SEQ ID NO: 157 - DNA, 50 bp, Artificial Sequence
  Description of Artificial Sequence: Synthetic probe
aatactacctaaaccctacctccactccrataattactacaactataccc

SEQ ID NO: 158 - DNA, 50 bp, Artificial Sequence
  Description of Artificial Sequence: Synthetic probe
tcataaaatcaaaaaatcaaaaccatcctaactaacaaaataaaacccca

SEQ ID NO: 159 - DNA, 50 bp, Artificial Sequence
  Description of Artificial Sequence: Synthetic probe
aaaataacratttaataaatactaaaactaatactctattttctccaatc

SEQ ID NO: 160 - DNA, 50 bp, Artificial Sequence
  Description of Artificial Sequence: Synthetic probe
cttcaaaatccaaactatttctattaactcacrttacctctaacaatctc

SEQ ID NO: 161 - DNA, 50 bp, Artificial Sequence
  Description of Artificial Sequence: Synthetic probe
actttacaaactaacaccctattcacacrtaaaaaattactcttatcacc

SEQ ID NO: 162 - DNA, 50 bp, Artificial Sequence
  Description of Artificial Sequence: Synthetic probe
ataactctaaacaaacctcaattatctcrtccaaaacaataaacaacrac

SEQ ID NO: 163 - DNA, 50 bp, Artificial Sequence
  Description of Artificial Sequence: Synthetic probe
acccraaccaactacractaacttcaatataaccataacaaccaaatccc

SEQ ID NO: 164 - DNA, 50 bp, Artificial Sequence
  Description of Artificial Sequence: Synthetic probe
tcccaatattctcaatacctactaaaaaaaactcacttctttattcatac

SEQ ID NO: 165 - DNA, 50 bp, Artificial Sequence
  Description of Artificial Sequence: Synthetic probe
caaaaacraaatcaattaaaaacrcaattctaaccccrccctcaaaacac

SEQ ID NO: 166 - DNA, 50 bp, Artificial Sequence
  Description of Artificial Sequence: Synthetic probe
ccrtactcaaaatcctaaaccraacrctatattccaaaaccatataccrc

SEQ ID NO: 167 - DNA, 50 bp, Artificial Sequence
  Description of Artificial Sequence: Synthetic probe
aacaaactccaaaaaatcraaaataaccttaaacaaaatttcttcactac

SEQ ID NO: 168 - DNA, 50 bp, Artificial Sequence
  Description of Artificial Sequence: Synthetic probe
aaactttttctcttcctctacaattcataactctttaaaaaacacccctc

SEQ ID NO: 169 - DNA, 50 bp, Artificial Sequence
  Description of Artificial Sequence: Synthetic probe
tcaaaattatcaaaaacaaatacactaacttcacaaccctaactcatctc

SEQ ID NO: 170 - DNA, 50 bp, Artificial Sequence
  Description of Artificial Sequence: Synthetic probe
aaatactaacctaatattctaatttaaaaaaaccctctcrtacccaccac

SEQ ID NO: 171 - DNA, 50 bp, Artificial Sequence
  Description of Artificial Sequence: Synthetic probe
acracracraaaacrcraacractaaaactaaataaaaaacaataccrac

SEQ ID NO: 172 - DNA, 50 bp, Artificial Sequence
  Description of Artificial Sequence: Synthetic probe
atatcrcaaccattcattccctaaaaaatataaaaccctaaccratcccc

SEQ ID NO: 173 - DNA, 50 bp, Artificial Sequence
  Description of Artificial Sequence: Synthetic probe
tatcacaaccattcattccctaaaaaatataaaaccctaaccaatcccca

SEQ ID NO: 174 - DNA, 50 bp, Artificial Sequence
  Description of Artificial Sequence: Synthetic probe
atacatcctcactctaataaaacctcaatcccctaaccacaatatactcc

SEQ ID NO: 175 - DNA, 50 bp, Artificial Sequence
  Description of Artificial Sequence: Synthetic probe
taatttttatggttgggtttaggtgttattttgattgttggtttagagtt

SEQ ID NO: 176 - DNA, 50 bp, Artificial Sequence
  Description of Artificial Sequence: Synthetic probe
aatctctataactaaactcaaatatcactctaactactaacccaaaaccc

SEQ ID NO: 177 - DNA, 50 bp, Artificial Sequence
  Description of Artificial Sequence: Synthetic probe
tatatttaattcaatttctatcattccttctaaatccttaatccaacaac

SEQ ID NO: 178 - DNA, 50 bp, Artificial Sequence
  Description of Artificial Sequence: Synthetic probe
tggaaggtgatttatagaaagtaagaatttgttgatatagagaaaggaat

SEQ ID NO: 179 - DNA, 50 bp, Artificial Sequence
  Description of Artificial Sequence: Synthetic probe
tcctaaaaatactataaataaaaaacccaaaataaaaacccttttatccc

SEQ ID NO: 180 - DNA, 50 bp, Artificial Sequence
  Description of Artificial Sequence: Synthetic probe
gttgtgaaaatagtagtatatttaggttgtgtattatygtgtatattgta

SEQ ID NO: 181 - DNA, 50 bp, Artificial Sequence
  Description of Artificial Sequence: Synthetic probe
tcaaaacttattatactaaaaactataaaatcacacaacaattacccctc

SEQ ID NO: 182 - DNA, 50 bp, Artificial Sequence
  Description of Artificial Sequence: Synthetic probe
taactaactactattattactacatcraaacccraatattcactaacrtc

SEQ ID NO: 183 - DNA, 50 bp, Artificial Sequence
  Description of Artificial Sequence: Synthetic probe
aaaaacttacctaatccttaaatattaaaaaactaaaaactccactaatc

SEQ ID NO: 184 - DNA, 50 bp, Artificial Sequence
  Description of Artificial Sequence: Synthetic probe
tttataacatctataacataacaccataaacaaacaaatatcctaaatac

SEQ ID NO: 185 - DNA, 50 bp, Artificial Sequence
  Description of Artificial Sequence: Synthetic probe
ttagtgaagtttttttggatattttaatggatagatgtgagggatagtta

SEQ ID NO: 186 - DNA, 50 bp, Artificial Sequence
  Description of Artificial Sequence: Synthetic probe
taataaaattttcctaaacatcccaataaataaatataaaaaacaatcac

SEQ ID NO: 187 - DNA, 50 bp, Artificial Sequence
  Description of Artificial Sequence: Synthetic probe
caactcrtaattaaccctaaactacraacrccaattttcattaaataaac

SEQ ID NO: 188 - DNA, 50 bp, Artificial Sequence
  Description of Artificial Sequence: Synthetic probe
aactcacaccaacratcaatcttccttaatttataactaaacaatatccc

SEQ ID NO: 189 - DNA, 50 bp, Artificial Sequence
  Description of Artificial Sequence: Synthetic probe
tccaatttaccaacaccatttattaaaaaaaatatcctttcccatactac

SEQ ID NO: 190 - DNA, 50 bp, Artificial Sequence
  Description of Artificial Sequence: Synthetic probe
atatatatatacaattcacaaaaatcacaataacttaactctaactcaac

SEQ ID NO: 191 - DNA, 50 bp, Artificial Sequence
  Description of Artificial Sequence: Synthetic probe
aatcattctccttactttaaataacaaaatcaactcaaatttaatccacc

SEQ ID NO: 192 - DNA, 50 bp, Artificial Sequence
  Description of Artificial Sequence: Synthetic probe
crttaaatcaaaaaattcctataaacccctaaaacraacttaatatcccc

SEQ ID NO: 193 - DNA, 50 bp, Artificial Sequence
  Description of Artificial Sequence: Synthetic probe
actttcaaccacacaacaccaaaataaccaaacattacttatatccaaac

SEQ ID NO: 194 - DNA, 50 bp, Artificial Sequence
  Description of Artificial Sequence: Synthetic probe
tcaactaaatttaaaaactacttattctttcacccttcaaaacaaccaac

SEQ ID NO: 195 - DNA, 50 bp, Artificial Sequence
  Description of Artificial Sequence: Synthetic probe
acrataccatcttaacccatcaacaaaaaaatttttatcccrttaattac

SEQ ID NO: 196 - DNA, 50 bp, Artificial Sequence
  Description of Artificial Sequence: Synthetic probe
aggaaattgaagttgaggaatagtgaagagtttgtttaatgttatagttt

SEQ ID NO: 197 - DNA, 50 bp, Artificial Sequence
  Description of Artificial Sequence: Synthetic probe
cccacrtaaactaaaaaactaaatattaaccctcraacaactacaaccrc

SEQ ID NO: 198 - DNA, 50 bp, Artificial Sequence
  Description of Artificial Sequence: Synthetic probe
aacaacaataaaaataacaaaacctctaatcccataactcctaatccctc

SEQ ID NO: 199 - DNA, 50 bp, Artificial Sequence
  Description of Artificial Sequence: Synthetic probe
taaacattcaaataatactaaaacacrcaattttcraaaacattaaactc

SEQ ID NO: 200 - DNA, 50 bp, Artificial Sequence
  Description of Artificial Sequence: Synthetic probe
aaacataaaccrtacatcaacaacaaactcctatacatcccrataatcac

SEQ ID NO: 201 - DNA, 50 bp, Artificial Sequence
  Description of Artificial Sequence: Synthetic probe
cctatacaacttctaatactacctccttctacaacraaaaataaaaaacc

SEQ ID NO: 202 - DNA, 50 bp, Artificial Sequence
  Description of Artificial Sequence: Synthetic probe
acaccaaaataattattcttaataaaacrcrcaaacctaaaaaaacaacc

SEQ ID NO: 203 - DNA, 50 bp, Artificial Sequence
  Description of Artificial Sequence: Synthetic probe
tacaaaaaaattcaaaacctacctaaaaaacraatacctaaaattactcc

SEQ ID NO: 204 - DNA, 50 bp, Artificial Sequence
  Description of Artificial Sequence: Synthetic probe
attcttctaccttaaaatactattaatctataaccttacccccaacccca

SEQ ID NO: 205 - DNA, 50 bp, Artificial Sequence
  Description of Artificial Sequence: Synthetic probe
aaacraaaatctacaacaaaactcaacttaatacacacaactccrccctc

SEQ ID NO: 206 - DNA, 50 bp, Artificial Sequence
  Description of Artificial Sequence: Synthetic probe
aaacrcccaaataaatattaccraaccaaacrctacaaaataaatataac

SEQ ID NO: 207 - DNA, 50 bp, Artificial Sequence
  Description of Artificial Sequence: Synthetic probe
taaayggaaatttgtagtaggatttagtttggtgtatataatttygtttt

SEQ ID NO: 208 - DNA, 50 bp, Artificial Sequence
  Description of Artificial Sequence: Synthetic probe
cacrctcrccttcaaattccaacataaaataattacaacaataaattctc

SEQ ID NO: 209 - DNA, 50 bp, Artificial Sequence
  Description of Artificial Sequence: Synthetic probe
tttgtttgttggagygtatatatttattaatgtaggatttagttgaggtt

SEQ ID NO: 210 - DNA, 50 bp, Artificial Sequence
  Description of Artificial Sequence: Synthetic probe
ctacctactaaaacrtatacactcactaatataaaacccaactaaaaccc

SEQ ID NO: 211 - DNA, 50 bp, Artificial Sequence
  Description of Artificial Sequence: Synthetic probe
ttaygttygtttttaagttttagtatggagtgattgtagtagtggatttt

SEQ ID NO: 212 - DNA, 50 bp, Artificial Sequence
  Description of Artificial Sequence: Synthetic probe
aaatcatcaccactccctaatctcaaatacccaaaaacacaaacactaca

SEQ ID NO: 213 - DNA, 50 bp, Artificial Sequence
  Description of Artificial Sequence: Synthetic probe
aataaaaaacatctctacccaaccacccatcatctaaaatataaaaaaca

SEQ ID NO: 214 - DNA, 50 bp, Artificial Sequence
  Description of Artificial Sequence: Synthetic probe
ctctaaaaacaaaaacactacacrcacttcaaaataaaaaattataaatc

SEQ ID NO: 215 - DNA, 50 bp, Artificial Sequence
  Description of Artificial Sequence: Synthetic probe
ggaaggtttggtttgatgatataagttagttgggattagataagtatgtt

SEQ ID NO: 216 - DNA, 50 bp, Artificial Sequence
  Description of Artificial Sequence: Synthetic probe
aaaaacctaatctaataacacaaatcaactaaaaccaaacaaacataccc

SEQ ID NO: 217 - DNA, 50 bp, Artificial Sequence
  Description of Artificial Sequence: Synthetic probe
ttttcttctctaacaacaataaaacaactactaacccaactctaattttc

SEQ ID NO: 218 - DNA, 50 bp, Artificial Sequence
  Description of Artificial Sequence: Synthetic probe
tccttcatactaataaaaaattattatattcattccttaaatctcrcrac

SEQ ID NO: 219 - DNA, 50 bp, Artificial Sequence
  Description of Artificial Sequence: Synthetic probe
tgatatgtagggtttttagtttttattttyggaatattatattgatttgg

SEQ ID NO: 220 - DNA, 50 bp, Artificial Sequence
  Description of Artificial Sequence: Synthetic probe
gatatgtagggtttttagtttttatttttggaatattatattgatttggt

SEQ ID NO: 221 - DNA, 50 bp, Artificial Sequence
  Description of Artificial Sequence: Synthetic probe
aacatacaaaacttccaacttctatccccraaatatcacactaacctaac

SEQ ID NO: 222 - DNA, 50 bp, Artificial Sequence
  Description of Artificial Sequence: Synthetic probe
acatacaaaacttccaacttctatccccaaaatatcacactaacctaaca

SEQ ID NO: 223 - DNA, 50 bp, Artificial Sequence
  Description of Artificial Sequence: Synthetic probe
aacrctcacctataaaaataaaactaaatcttccraaccttacraaaaac

SEQ ID NO: 224 - DNA, 50 bp, Artificial Sequence
  Description of Artificial Sequence: Synthetic probe
caaaaccaacrcracccaaaacrctaaaacrcataaaatactataacaac

SEQ ID NO: 225 - DNA, 50 bp, Artificial Sequence
  Description of Artificial Sequence: Synthetic probe
aaaaaatatacccaacaactcattaaaaacaaaccataataacaataaca

SEQ ID NO: 226 - DNA, 50 bp, Artificial Sequence
  Description of Artificial Sequence: Synthetic probe
aatacttccacctctacttaaaaaatttaaataataaattaaaccctatc

SEQ ID NO: 227 - DNA, 50 bp, Artificial Sequence
  Description of Artificial Sequence: Synthetic probe
ttatygtgtttgttttttgggtatagggtatgattatttttataatggta

SEQ ID NO: 228 - DNA, 50 bp, Artificial Sequence
  Description of Artificial Sequence: Synthetic probe
taccrtacctatttcctaaatacaaaatataaccacccccataataacac

SEQ ID NO: 229 - DNA, 50 bp, Artificial Sequence
  Description of Artificial Sequence: Synthetic probe
tatccaaatcccrcrctctcaaaaactatatttctaccrcttccaaaaac

SEQ ID NO: 230 - DNA, 50 bp, Artificial Sequence
  Description of Artificial Sequence: Synthetic probe
tattctaatttctatctataactcrtttctaattctaccaccrcratacc

SEQ ID NO: 231 - DNA, 50 bp, Artificial Sequence
  Description of Artificial Sequence: Synthetic probe
acrcccraccaacatatttaatcttaacaacattaaaaaacaaacrttac

SEQ ID NO: 232 - DNA, 50 bp, Artificial Sequence
  Description of Artificial Sequence: Synthetic probe
atcraaatcctaatacccttaaatccctcctctttatacaaataacctcc

SEQ ID NO: 233 - DNA, 50 bp, Artificial Sequence
  Description of Artificial Sequence: Synthetic probe
aaaaactaacttacttaaccrccactaaaaaattctaaataattcraaac

SEQ ID NO: 234 - DNA, 50 bp, Artificial Sequence
  Description of Artificial Sequence: Synthetic probe
tttagaattttggttattatttattagyggagtgggtttaaattttaggg

SEQ ID NO: 235 - DNA, 50 bp, Artificial Sequence
  Description of Artificial Sequence: Synthetic probe
aaaacatttaaacaaccacaacttcacccraaaacacaaaacratataac

SEQ ID NO: 236 - DNA, 50 bp, Artificial Sequence
  Description of Artificial Sequence: Synthetic probe
ccaatttcrtctaacaccactaaattacaatatattctttttactattcc

SEQ ID NO: 237 - DNA, 50 bp, Artificial Sequence
  Description of Artificial Sequence: Synthetic probe
cacaccaaacraataacrccrtaaataataatattattacaaaaaaactc

SEQ ID NO: 238 - DNA, 50 bp, Artificial Sequence
  Description of Artificial Sequence: Synthetic probe
rtcrctcraacccaaaacactacaatttctctatacratctccaaaactc

SEQ ID NO: 239 - DNA, 50 bp, Artificial Sequence
  Description of Artificial Sequence: Synthetic probe
accraaaaactaaattcraaactaacaaaacracraaaccaatatcrccc

SEQ ID NO: 240 - DNA, 50 bp, Artificial Sequence
  Description of Artificial Sequence: Synthetic probe
ccacctaaacrcrcraaactttactcrtttactattaaaaaaattccaac

SEQ ID NO: 241 - DNA, 50 bp, Artificial Sequence
  Description of Artificial Sequence: Synthetic probe
cattacttaaaaactcraacrtacrcaaaactccraattcaatttcccrc

SEQ ID NO: 242 - DNA, 50 bp, Artificial Sequence
  Description of Artificial Sequence: Synthetic probe
caaacttataaacraaacrcacrtcrcaataaaaacaacrataaaaccrc

SEQ ID NO: 243 - DNA, 50 bp, Artificial Sequence
  Description of Artificial Sequence: Synthetic probe
attataaatcatactactataaaaacacatacacacatatatttattaca

SEQ ID NO: 244 - DNA, 50 bp, Artificial Sequence
  Description of Artificial Sequence: Synthetic probe
ctaacaacattcraaccraaatatctcrctccrtaaccttaactatactc

SEQ ID NO: 245 - DNA, 50 bp, Artificial Sequence
  Description of Artificial Sequence: Synthetic probe
cttcactaaaataatacaaaaaacccaaaaaactacracrctcaaaatac

SEQ ID NO: 246 - DNA, 50 bp, Artificial Sequence
  Description of Artificial Sequence: Synthetic probe
aaaactcrtaattccraaacccrataaacattcaaataatactaaaacac

SEQ ID NO: 247 - DNA, 50 bp, Artificial Sequence
  Description of Artificial Sequence: Synthetic probe
aaaaaattcctataaacccctaaaacraacttaatatccccraaaactac

SEQ ID NO: 248 - DNA, 50 bp, Artificial Sequence
  Description of Artificial Sequence: Synthetic probe
accraatttaaaaattaaaacctccractacaaatccrcctaaaccaaac

SEQ ID NO: 249 - DNA, 50 bp, Artificial Sequence
  Description of Artificial Sequence: Synthetic probe
aaaaaaaaacratacratctaaaaaaaatacttccraaaactatttcaac

SEQ ID NO: 250 - DNA, 50 bp, Artificial Sequence
  Description of Artificial Sequence: Synthetic probe
ccraaaattataatacccaaaccatactctcataaatccaaccaaatcrc

SEQ ID NO: 251 - DNA, 50 bp, Artificial Sequence
  Description of Artificial Sequence: Synthetic probe
aaaactactccrccaatacataaaactaacractactaccraaaaatcac

SEQ ID NO: 252 - DNA, 50 bp, Artificial Sequence
  Description of Artificial Sequence: Synthetic probe
cttaaaaaactccrtttactcaaatccttaactctctaactcaaatctcc

SEQ ID NO: 253 - DNA, 50 bp, Artificial Sequence
  Description of Artificial Sequence: Synthetic probe
aaacaaaacttacaataaaccaaaattacaccactacaatccacaatcca

SEQ ID NO: 254 - DNA, 50 bp, Artificial Sequence
  Description of Artificial Sequence: Synthetic probe
caaccaaatttcattatcrtaaaaaccaattaccractatatacctacac

SEQ ID NO: 255 - DNA, 50 bp, Artificial Sequence
  Description of Artificial Sequence: Synthetic probe
aaacctaaaaacctaaaaaattaatattatataaaatccctacraaaccc

SEQ ID NO: 256 - DNA, 50 bp, Artificial Sequence
  Description of Artificial Sequence: Synthetic probe
aaaacaaactaccaaaatcccaaaaaactaacttaaaattcctaaatacc

SEQ ID NO: 257 - DNA, 50 bp, Artificial Sequence
  Description of Artificial Sequence: Synthetic probe
tttcrtaccraccaaacaaaaaatttatcrcctaaaaacccaaaaaaaac

SEQ ID NO: 258 - DNA, 50 bp, Artificial Sequence
  Description of Artificial Sequence: Synthetic probe
aacaataactttaaaataaataaatcctacaaataccacctcaaataaac

SEQ ID NO: 259 - DNA, 50 bp, Artificial Sequence
  Description of Artificial Sequence: Synthetic probe
ctaaaatacctaacatcaatatacccatcctaacaatattaactttaatc

SEQ ID NO: 260 - DNA, 50 bp, Artificial Sequence
  Description of Artificial Sequence: Synthetic probe
aactaaattctctactcaaaatctatcactcaaaatattaaccaactatc

SEQ ID NO: 261 - DNA, 50 bp, Artificial Sequence
  Description of Artificial Sequence: Synthetic probe
acatttctccaaataaccttatttccttttattaaaaactaatataacac

SEQ ID NO: 262 - DNA, 50 bp, Artificial Sequence
  Description of Artificial Sequence: Synthetic probe
aacaaaaaaatcaaaaaaacacratatcatcaaaaccatccaaatatttc

SEQ ID NO: 263 - DNA, 50 bp, Artificial Sequence
  Description of Artificial Sequence: Synthetic probe
aagtaaggaagttaggagaatayggtgttattagggttatttaagtattt

SEQ ID NO: 264 - DNA, 50 bp, Artificial Sequence
  Description of Artificial Sequence: Synthetic probe
ttgtttgttttagtgtagataggtttggttttgaatagtatttagtttta

SEQ ID NO: 265 - DNA, 50 bp, Artificial Sequence
  Description of Artificial Sequence: Synthetic probe
tatttattccaatacaaacaaacttaactttaaacaacatccaactccac

SEQ ID NO: 266 - DNA, 50 bp, Artificial Sequence
  Description of Artificial Sequence: Synthetic probe
ccacccaacaacaacaaaatacacattcttctcaaatatattataaaaac

SEQ ID NO: 267 - DNA, 50 bp, Artificial Sequence
  Description of Artificial Sequence: Synthetic probe
tatctattttatataaaataaaaacacacaccccttacraattatcttac

SEQ ID NO: 268 - DNA, 50 bp, Artificial Sequence
  Description of Artificial Sequence: Synthetic probe
tattctcaaatttaattttacaaaattatttatcttcaaaccattttatc

SEQ ID NO: 269 - DNA, 50 bp, Artificial Sequence
  Description of Artificial Sequence: Synthetic probe
acttaacttttcaacatctcaaataccttttctaaatttaacaaatacac

SEQ ID NO: 270 - DNA, 50 bp, Artificial Sequence
  Description of Artificial Sequence: Synthetic probe
gagaagttaataaagagagataagttaggtatttgggagtatatttttga

SEQ ID NO: 271 - DNA, 50 bp, Artificial Sequence
  Description of Artificial Sequence: Synthetic probe
tatatactattttttacaaaaattcctaaactccattttctaattcatac

SEQ ID NO: 272 - DNA, 50 bp, Artificial Sequence
  Description of Artificial Sequence: Synthetic probe
taactaaaacaaaaatcatcattatcatatcacattcatcatttaccaac

SEQ ID NO: 273 - DNA, 50 bp, Artificial Sequence
  Description of Artificial Sequence: Synthetic probe
tttactcttaaatacaacaccaaaaattattaataaacaactaatatatc

SEQ ID NO: 274 - DNA, 50 bp, Artificial Sequence
  Description of Artificial Sequence: Synthetic probe
acaacaccaaaaattattaataaacaactaatatatcrtttatcraaaac

SEQ ID NO: 275 - DNA, 50 bp, Artificial Sequence
  Description of Artificial Sequence: Synthetic probe
tcattttatctaaataaattttattatctcracatataataaaaatatcc

SEQ ID NO: 276 - DNA, 50 bp, Artificial Sequence
  Description of Artificial Sequence: Synthetic probe
ctaattttacaaaccttcaactcraaaaacttcacattccaaatactaac

SEQ ID NO: 277 - DNA, 50 bp, Artificial Sequence
  Description of Artificial Sequence: Synthetic probe
aaatcataatataaaatataaaattatctaattttacaaaccttcaactc

SEQ ID NO: 278 - DNA, 50 bp, Artificial Sequence
  Description of Artificial Sequence: Synthetic probe
tgaaattaaggttttatggttatygttagtatttggaatgtgaagttttt

SEQ ID NO: 279 - DNA, 50 bp, Artificial Sequence
  Description of Artificial Sequence: Synthetic probe
taaaattaaataatcctacatctcacattataattctaatccttatattc

SEQ ID NO: 280 - DNA, 50 bp, Artificial Sequence
  Description of Artificial Sequence: Synthetic probe
tatctctacacatatatttctcaacttactttactcaaaacaacctatac

SEQ ID NO: 281 - DNA, 50 bp, Artificial Sequence
  Description of Artificial Sequence: Synthetic probe
tttgaaatgaaaygtggggaatataaggattatgaggtttttatttagaa

SEQ ID NO: 282 - DNA, 50 bp, Artificial Sequence
  Description of Artificial Sequence: Synthetic probe
ctaaatacctaaattcaaaatttaactttactactaacaaatatttaccc

SEQ ID NO: 283 - DNA, 50 bp, Artificial Sequence
  Description of Artificial Sequence: Synthetic probe
tactaaataaaaaataaaatcatctcaccttaaaccccttccctccttac

SEQ ID NO: 284 - DNA, 50 bp, Artificial Sequence
  Description of Artificial Sequence: Synthetic probe
agatggaagtaagagtatttagaaaaaaaagttggtattattaagtagag

SEQ ID NO: 285 - DNA, 50 bp, Artificial Sequence
  Description of Artificial Sequence: Synthetic probe
caatatattactctcttatcaactacacaaatcataaaaaaaattccccc

SEQ ID NO: 286 - DNA, 50 bp, Artificial Sequence
  Description of Artificial Sequence: Synthetic probe
ttctccttaaaaaccrtttccctataccrttccattaataaaatctcccc

SEQ ID NO: 287 - DNA, 50 bp, Artificial Sequence
  Description of Artificial Sequence: Synthetic probe
ataaagtgttttaaaagtttagagaaggaaagtatagtgttaaaggggtt

SEQ ID NO: 288 - DNA, 50 bp, Artificial Sequence
  Description of Artificial Sequence: Synthetic probe
tacctaaattcraaatatttatctatcactactcaacactatcaataaac

SEQ ID NO: 289 - DNA, 50 bp, Artificial Sequence
  Description of Artificial Sequence: Synthetic probe
aattttttaagtttattttgagtagaggttgtattataaggggattgttt

SEQ ID NO: 290 - DNA, 50 bp, Artificial Sequence
  Description of Artificial Sequence: Synthetic probe
attcctcaaatccactctaaataaaaactacatcacaaaaaaattacccc

SEQ ID NO: 291 - DNA, 50 bp, Artificial Sequence
  Description of Artificial Sequence: Synthetic probe
atattttagttattagttgaagagtttgtattaagagttttggaaggaga

SEQ ID NO: 292 - DNA, 50 bp, Artificial Sequence
  Description of Artificial Sequence: Synthetic probe
taacctactaatcctaaacccattactctaaaaaaaacttttctctaacc

SEQ ID NO: 293 - DNA, 50 bp, Artificial Sequence
  Description of Artificial Sequence: Synthetic probe
accraaaaaaaactttcccraccctaaaccctactaacaaacraaatatc

SEQ ID NO: 294 - DNA, 50 bp, Artificial Sequence
  Description of Artificial Sequence: Synthetic probe
tataataattttaattagatttttgttagttgagtaggaggttagttggg

SEQ ID NO: 295 - DNA, 50 bp, Artificial Sequence
  Description of Artificial Sequence: Synthetic probe
acaacaactccaaccaaattcctatcaactaaataaaaaaccaattaaac

SEQ ID NO: 296 - DNA, 50 bp, Artificial Sequence
  Description of Artificial Sequence: Synthetic probe
aaacatcttacaatacatataacctctaacttttcctcaccccraatctc

SEQ ID NO: 297 - DNA, 50 bp, Artificial Sequence
  Description of Artificial Sequence: Synthetic probe
taataacttataacatattcttaaacaaaccactcacctccctaaatttc

SEQ ID NO: 298 - DNA, 50 bp, Artificial Sequence
  Description of Artificial Sequence: Synthetic probe
attctaccaacctcatctttataaaaacacttcccttaatcctaccacac

SEQ ID NO: 299 - DNA, 50 bp, Artificial Sequence
  Description of Artificial Sequence: Synthetic probe
gaggtgaagaygattttggaaattagtttagatgtgtatgtattagttta

SEQ ID NO: 300 - DNA, 50 bp, Artificial Sequence
  Description of Artificial Sequence: Synthetic probe
aaataaaaacratcttaaaaatcaacccaaatatacatacaccaatccac

SEQ ID NO: 301 - DNA, 50 bp, Artificial Sequence
  Description of Artificial Sequence: Synthetic probe
tttctaaattacaaacaaaaactatattaccataccacaaaaactataac

SEQ ID NO: 302 - DNA, 50 bp, Artificial Sequence
  Description of Artificial Sequence: Synthetic probe
acttattcaaaaatacctcatactttttaacacattcatctataaaatac

SEQ ID NO: 303 - DNA, 50 bp, Artificial Sequence
  Description of Artificial Sequence: Synthetic probe
crtaaaaaccraaaacttaactcrtatacttccraacataatatccctcc

SEQ ID NO: 304 - DNA, 50 bp, Artificial Sequence
  Description of Artificial Sequence: Synthetic probe
acctaaacaacattaaacactaaataaataaaactccatctacaatccca

SEQ ID NO: 305 - DNA, 50 bp, Artificial Sequence
  Description of Artificial Sequence: Synthetic probe
acactaaataaataaaactccatctacaatcccaacacctcaaaaaacca

SEQ ID NO: 306 - DNA, 50 bp, Artificial Sequence
  Description of Artificial Sequence: Synthetic probe
cttattataaaaaatcacrttttacaacatcttaaccrcaaaaaaccrac

SEQ ID NO: 307 - DNA, 50 bp, Artificial Sequence
  Description of Artificial Sequence: Synthetic probe
tttcccaaccaaaaaaactaacaaacacttctactttcatttcataaaac

SEQ ID NO: 308 - DNA, 50 bp, Artificial Sequence
  Description of Artificial Sequence: Synthetic probe
acaaaaaaaaaatcccttctaaccatcaatcataaaaataataacataac

SEQ ID NO: 309 - DNA, 50 bp, Artificial Sequence
  Description of Artificial Sequence: Synthetic probe
cataataaactaaccaaataacrtccctcctaaaaactaaaaccrcaccc

SEQ ID NO: 310 - DNA, 50 bp, Artificial Sequence
  Description of Artificial Sequence: Synthetic probe
cracttaactacctttaaatattaaaattcctcaaaactatactaatatc

SEQ ID NO: 311 - DNA, 50 bp, Artificial Sequence
  Description of Artificial Sequence: Synthetic probe
ctactacactaaaaaaatcaccctaccrccttcrttatcaattatacaac

SEQ ID NO: 312 - DNA, 50 bp, Artificial Sequence
  Description of Artificial Sequence: Synthetic probe
acacccaaaaactcccraatttataccacaaaactactacraacaatacc

SEQ ID NO: 313 - DNA, 50 bp, Artificial Sequence
  Description of Artificial Sequence: Synthetic probe
ttatcatataaatctcaaaacacaaaataacattaaaaatctaatttaac

SEQ ID NO: 314 - DNA, 50 bp, Artificial Sequence
  Description of Artificial Sequence: Synthetic probe
aaaaaaaccrcaaaatccatatcaaaactaataaactatttctaaaactc

SEQ ID NO: 315 - DNA, 50 bp, Artificial Sequence
  Description of Artificial Sequence: Synthetic probe
aatattccctcatttaaaaaacaacttaaaaatacattaatctacccaac

SEQ ID NO: 316 - DNA, 50 bp, Artificial Sequence
  Description of Artificial Sequence: Synthetic probe
aaaaaatatacccaacaactcattaaaaacaaaccataataataataaca

SEQ ID NO: 317 - DNA, 50 bp, Artificial Sequence
  Description of Artificial Sequence: Synthetic probe
ccccctccttccaacctataacttcttattaccrtaaaaataataacccc

SEQ ID NO: 318 - DNA, 50 bp, Artificial Sequence
  Description of Artificial Sequence: Synthetic probe
tataaacatttaacctattttattaacaactcaacaaaaacccaaatatc

SEQ ID NO: 319 - DNA, 50 bp, Artificial Sequence; identical to SEQ ID NO: 318
  Description of Artificial Sequence: Synthetic probe

SEQ ID NO: 320 - DNA, 50 bp, Artificial Sequence
  Description of Artificial Sequence: Synthetic probe
ataaacatttaacctattttattaacaactcaacaaaaacccaaatatca

SEQ ID NO: 321 - DNA, 50 bp, Artificial Sequence
  Description of Artificial Sequence: Synthetic probe
tcatataaaaaaaacacatcattaactataacatccatcttaactataac

SEQ ID NO: 322 - DNA, 50 bp, Artificial Sequence
  Description of Artificial Sequence: Synthetic probe
rattacraaccraacraacttaacccaaaaacccraacctaaaaaaaaac

SEQ ID NO: 323 - DNA, 50 bp, Artificial Sequence
  Description of Artificial Sequence: Synthetic probe
aaaatcatttccaacatctccaaaatctaaaaaatccaatctccattaca

SEQ ID NO: 324 - DNA, 50 bp, Artificial Sequence
  Description of Artificial Sequence: Synthetic probe
tttattcctacccaccttcrattcttaaaaaaaaaccaactcctcttatc

SEQ ID NO: 325 - DNA, 50 bp, Artificial Sequence
  Description of Artificial Sequence: Synthetic probe
acacattataaaatttaaaaataattccccactccacaacctaacrcatc

SEQ ID NO: 326 - DNA, 50 bp, Artificial Sequence
  Description of Artificial Sequence: Synthetic probe
caccraaaattataatacccaaaccatactctcataaatccaaccaaatc

SEQ ID NO: 327 - DNA, 50 bp, Artificial Sequence
  Description of Artificial Sequence: Synthetic probe
aaaaaaacratacratctaaaaaaaatacttccraaaactatttcaacrc

SEQ ID NO: 328 - DNA, 50 bp, Artificial Sequence
  Description of Artificial Sequence: Synthetic probe
actatactctcaactactcraaactaatccctactttaaactacrctccc

SEQ ID NO: 329 - DNA, 50 bp, Artificial Sequence
  Description of Artificial Sequence: Synthetic probe
aaaacctataaaatttacctactaacctcctctcaacaactcactattac

SEQ ID NO: 330 - DNA, 50 bp, Artificial Sequence
  Description of Artificial Sequence: Synthetic probe
tttatagaagaggggtttgggatttagattaagtgatttgttttaagtyg

SEQ ID NO: 331 - DNA, 50 bp, Artificial Sequence
  Description of Artificial Sequence: Synthetic probe
aataaaaatacctcraaatttcccaaactaacrtcaaaattatacctctc

SEQ ID NO: 332 - DNA, 50 bp, Artificial Sequence
  Description of Artificial Sequence: Synthetic probe
aaatacttcaaaaaaaaaatcrccctcttactatttccttaaaaattttc

SEQ ID NO: 333 - DNA, 50 bp, Artificial Sequence
  Description of Artificial Sequence: Synthetic probe
tcctaaaaaacccttactacaattttatttctctttcaaaacaataactc

SEQ ID NO: 334 - DNA, 50 bp, Artificial Sequence
  Description of Artificial Sequence: Synthetic probe
raacraaatctatccaaacaactcctctccctaaccaaataaaaacrctc

SEQ ID NO: 335 - DNA, 50 bp, Artificial Sequence
  Description of Artificial Sequence: Synthetic probe
attttacttatccatttatctattcataaacacttacattattaccacac

SEQ ID NO: 336 - DNA, 50 bp, Artificial Sequence
  Description of Artificial Sequence: Synthetic probe
taaatttcraaacataaacctaaaccatacracccccttaaccccttaac

SEQ ID NO: 337 - DNA, 50 bp, Artificial Sequence
  Description of Artificial Sequence: Synthetic probe
tcccaaaaaacaaaacraactctcacaatcactctctaataccraatctc

SEQ ID NO: 338 - DNA, 50 bp, Artificial Sequence
  Description of Artificial Sequence: Synthetic probe
atcataaaaaccatccacaacttccttccataaaactcactaaaaacaac

SEQ ID NO: 339 - DNA, 50 bp, Artificial Sequence
  Description of Artificial Sequence: Synthetic probe
actactcrtaaaatcactcctaaaacaattcctaattatatcttaatacc

SEQ ID NO: 340 - DNA, 50 bp, Artificial Sequence
  Description of Artificial Sequence: Synthetic probe
tttttttctaacttctaattctctctcaaaatttaccaatctctaaaacc

SEQ ID NO: 341 - DNA, 50 bp, Artificial Sequence
  Description of Artificial Sequence: Synthetic probe
ttttttctaacttctaattctctctcaaaatttaccaatctctaaaacca

SEQ ID NO: 342 - DNA, 50 bp, Artificial Sequence
  Description of Artificial Sequence: Synthetic probe
ggttgggaagagttgagggttataggatgatttttgtttaaagatataag

SEQ ID NO: 343 - DNA, 50 bp, Artificial Sequence
  Description of Artificial Sequence: Synthetic probe
gttgggaagagttgagggttataggatgatttttgtttaaagatataagt

SEQ ID NO: 344 - DNA, 50 bp, Artificial Sequence
  Description of Artificial Sequence: Synthetic probe
aaaactattctataacccaaatctcctcaatttaactattaaacttaccc

SEQ ID NO: 345 - DNA, 50 bp, Artificial Sequence
  Description of Artificial Sequence: Synthetic probe
aaataaaaaaataattcaaaaaatctctctcccctactcattcctctcac

SEQ ID NO: 346 - DNA, 50 bp, Artificial Sequence
  Description of Artificial Sequence: Synthetic probe
ataatcaaaatcatttacataaaaaactcctaaaaacacrtataaccatc

SEQ ID NO: 347 - DNA, 50 bp, Artificial Sequence
  Description of Artificial Sequence: Synthetic probe
caacaaaataatatcaaatttacaaaacttcccaaaatcrataatcacac

SEQ ID NO: 348 - DNA, 50 bp, Artificial Sequence
  Description of Artificial Sequence: Synthetic probe
caatcactccaccttctctcacrttaaaataaaatttaaaacttttccac

SEQ ID NO: 349 - DNA, 50 bp, Artificial Sequence
  Description of Artificial Sequence: Synthetic probe
tttaggttttgttgaaatataggygttttggttataygagaggttattat

SEQ ID NO: 350 - DNA, 50 bp, Artificial Sequence
  Description of Artificial Sequence: Synthetic probe
ccaaactttactaaaacacaaacrccctaatcacacraaaaatcaccacc

SEQ ID NO: 351 - DNA, 50 bp, Artificial Sequence
  Description of Artificial Sequence: Synthetic probe
atactaaaaaaaaaacccccatcrataataacctctcrtataaccaaaac

SEQ ID NO: 352 - DNA, 50 bp, Artificial Sequence
  Description of Artificial Sequence: Synthetic probe
caaacaataccttcaactctaaactcaaacrtctcaaaccttatttttac

SEQ ID NO: 353 - DNA, 50 bp, Artificial Sequence
  Description of Artificial Sequence: Synthetic probe
tcacttatatattcaacaaacatttattaaaaccataaaatacatctaac

SEQ ID NO: 354 - DNA, 50 bp, Artificial Sequence
  Description of Artificial Sequence: Synthetic probe
atatattcaacaaacatttattaaaaccataaaatacatctaacrcracc

SEQ ID NO: 355 - DNA, 50 bp, Artificial Sequence
  Description of Artificial Sequence: Synthetic probe
aaactcacaacttacrcatcttactattcttcaataacataaaatttaac

SEQ ID NO: 356 - DNA, 50 bp, Artificial Sequence
  Description of Artificial Sequence: Synthetic probe
aactctccttttaaactataaactccttaataacaaaactcacaacttac

SEQ ID NO: 357 - DNA, 50 bp, Artificial Sequence
  Description of Artificial Sequence: Synthetic probe
aaaaaaaaatctaacrctaaacttcatactactaaaaaataacaaaatac

SEQ ID NO: 358 - DNA, 50 bp, Artificial Sequence
  Description of Artificial Sequence: Synthetic probe
ctaaccaaaaaaaatcttatcctcctctaaactccataatctttatttac

SEQ ID NO: 359 - DNA, 50 bp, Artificial Sequence
  Description of Artificial Sequence: Synthetic probe
ttttttttggttagggtattaggaaaggtttaagtagtattttagagttg

SEQ ID NO: 360 - DNA, 50 bp, Artificial Sequence
  Description of Artificial Sequence: Synthetic probe
ctcctctaaccaaaacatcaaaaaaaattcaaataatactctaaaactac

SEQ ID NO: 361 - DNA, 50 bp, Artificial Sequence
  Description of Artificial Sequence: Synthetic probe
tcacctaaaataatatctttccctacaacttttcctaaataaccaatccc

SEQ ID NO: 362 - DNA, 50 bp, Artificial Sequence
  Description of Artificial Sequence: Synthetic probe
acactctctattattacctatatataattcttacctctaaattaaataac

SEQ ID NO: 363 - DNA, 50 bp, Artificial Sequence
  Description of Artificial Sequence: Synthetic probe
aataaatctacttctaaccaatcactactttcaacttacctactactccc

SEQ ID NO: 364 - DNA, 50 bp, Artificial Sequence
  Description of Artificial Sequence: Synthetic probe
taagagttttagttgttattagtagggaagttgaatgtggttatgtgtat

SEQ ID NO: 365 - DNA, 50 bp, Artificial Sequence
  Description of Artificial Sequence: Synthetic probe
attaactactcacttaaaaatttaaccttacactaatatttaaaataacc

SEQ ID NO: 366 - DNA, 50 bp, Artificial Sequence
  Description of Artificial Sequence: Synthetic probe
rtaaataaaaacttcaaataacctacaaatacrccccctactaacccrtc

SEQ ID NO: 367 - DNA, 50 bp, Artificial Sequence
  Description of Artificial Sequence: Synthetic probe
caacctccaccttatcccrtaaataaaaacttcaaataacctacaaatac

SEQ ID NO: 368 - DNA, 50 bp, Artificial Sequence
  Description of Artificial Sequence: Synthetic probe
racraaccaacaaaaaacrcacttacaaatcacctaaaatccttatttac

SEQ ID NO: 369 - DNA, 50 bp, Artificial Sequence
  Description of Artificial Sequence: Synthetic probe
tttaataaaataacractaaaattccctactccrtccaataccaacrtcc

SEQ ID NO: 370 - DNA, 50 bp, Artificial Sequence
  Description of Artificial Sequence: Synthetic probe
accctttaataaaataacractaaaattccctactccrtccaataccaac

SEQ ID NO: 371 - DNA, 50 bp, Artificial Sequence
  Description of Artificial Sequence: Synthetic probe
tctaaacrctaaaaccctttaataaaataacractaaaattccctactcc

SEQ ID NO: 372 - DNA, 50 bp, Artificial Sequence
  Description of Artificial Sequence: Synthetic probe
actaaacraaataaaaaaccctaaccrttatcccaccaaaaaatcccaac

SEQ ID NO: 373 - DNA, 50 bp, Artificial Sequence
  Description of Artificial Sequence: Synthetic probe
aaaaactacraaaaactcctacaatacraaaaacccttaaaacccaaaac

SEQ ID NO: 374 - DNA, 50 bp, Artificial Sequence
  Description of Artificial Sequence: Synthetic probe
caacaactacctaaaacaatccccrtaatcctaacaaaaaacraaacctc

SEQ ID NO: 375 - DNA, 50 bp, Artificial Sequence
  Description of Artificial Sequence: Synthetic probe
ctcctacaatacraaaaacccttaaaacccaaaacraaatcctacraacc

SEQ ID NO: 376 - DNA, 50 bp, Artificial Sequence
  Description of Artificial Sequence: Synthetic probe
atcaaattcctctatattctaaaaaaatattctaaccraaatccrcracc

SEQ ID NO: 377 - DNA, 50 bp, Artificial Sequence
  Description of Artificial Sequence: Synthetic probe
cccrttctctattaaaatcacraaaactaccccaaacaactactaaaccc

SEQ ID NO: 378 - DNA, 50 bp, Artificial Sequence
  Description of Artificial Sequence: Synthetic probe
ttctctattaaaatcacraaaactaccccaaacaactactaaacccratc

SEQ ID NO: 379 - DNA, 50 bp, Artificial Sequence
  Description of Artificial Sequence: Synthetic probe
taatatcaaattcctctatattctaaaaaaatattctaaccraaatccrc

SEQ ID NO: 380 - DNA, 50 bp, Artificial Sequence
  Description of Artificial Sequence: Synthetic probe
actaatatcaaattcctctatattctaaaaaaatattctaaccraaatcc

SEQ ID NO: 381 - DNA, 50 bp, Artificial Sequence
  Description of Artificial Sequence: Synthetic probe
ctctattaaaatcacraaaactaccccaaacaactactaaacccratcrc

SEQ ID NO: 382 - DNA, 50 bp, Artificial Sequence
  Description of Artificial Sequence: Synthetic probe
aaaccraaaaaaatacraaaaacctaaaccrataacccttccacactacc

SEQ ID NO: 383 - DNA, 50 bp, Artificial Sequence
  Description of Artificial Sequence: Synthetic probe
aaaacracaatataaaaaaaccatcracctaaatctttcrtatcccctcc

SEQ ID NO: 384 - DNA, 50 bp, Artificial Sequence
  Description of Artificial Sequence: Synthetic probe
aatactccractaaaaccaaattcctaaaaccrttcctttcrctatttcc

SEQ ID NO: 385 - DNA, 50 bp, Artificial Sequence
  Description of Artificial Sequence: Synthetic probe
atattcaccaatactccractaaaaccaaattcctaaaaccrttcctttc

SEQ ID NO: 386 - DNA, 50 bp, Artificial Sequence
  Description of Artificial Sequence: Synthetic probe
atacrttcraaaacaacraaaaaaacracctcaaaaatctaacctcaacc

SEQ ID NO: 387 - DNA, 50 bp, Artificial Sequence
  Description of Artificial Sequence: Synthetic probe
cracctcaaaaatctaacctcaaccraaacactaataaacacaaactccc

SEQ ID NO: 388 - DNA, 50 bp, Artificial Sequence
  Description of Artificial Sequence: Synthetic probe
cctcaaaaatctaacctcaaccraaacactaataaacacaaactcccrtc

SEQ ID NO: 389 - DNA, 50 bp, Artificial Sequence
  Description of Artificial Sequence: Synthetic probe
tcaaaaatctaacctcaaccraaacactaataaacacaaactcccrtcrc

SEQ ID NO: 390 - DNA, 50 bp, Artificial Sequence
  Description of Artificial Sequence: Synthetic probe
aaaaataaaaaaaactacttccraacraaaaaactacacttccraaaccc

SEQ ID NO: 391 - DNA, 50 bp, Artificial Sequence
  Description of Artificial Sequence: Synthetic probe
aaataaaaaaaactacttccraacraaaaaactacacttccraaacccrc

SEQ ID NO: 392 - DNA, 50 bp, Artificial Sequence
  Description of Artificial Sequence: Synthetic probe
caaccracataaatctaaatctaaccaatctcctaaccctaaccrtaacc

SEQ ID NO: 393 - DNA, 50 bp, Artificial Sequence
  Description of Artificial Sequence: Synthetic probe
atacccatataaaccataactaaaaaactacctaaaaccaaactcatatc

SEQ ID NO: 394 - DNA, 50 bp, Artificial Sequence
  Description of Artificial Sequence: Synthetic probe
tacccatataaaccataactaaaaaactacctaaaaccaaactcatatca

SEQ ID NO: 395 - DNA, 50 bp, Artificial Sequence
  Description of Artificial Sequence: Synthetic probe
accctaatttctatccttacaataaataaacttccaaatcttactaattc

SEQ ID NO: 396 - DNA, 50 bp, Artificial Sequence
  Description of Artificial Sequence: Synthetic probe
acctttcaacataataactaaccaccctacaaactatattaacaacccac

SEQ ID NO: 397 - DNA, 50 bp, Artificial Sequence
  Description of Artificial Sequence: Synthetic probe
aaaacttctaaaactatacttcactaattattctaattatataaaaattc

SEQ ID NO: 398 - DNA, 50 bp, Artificial Sequence
  Description of Artificial Sequence: Synthetic probe
aatcaacattaattaaaaaatctataacttcaacataaaaacrcataacc

SEQ ID NO: 399 - DNA, 50 bp, Artificial Sequence
  Description of Artificial Sequence: Synthetic probe
atcaataaaatacaattccaaaaatccttcaaatataaacttatatcaac

SEQ ID NO: 400 - DNA, 50 bp, Artificial Sequence
  Description of Artificial Sequence: Synthetic probe
aagtatagttttagaagttttttaagtgtggatttgtgttagyggttatg

SEQ ID NO: 401 - DNA, 50 bp, Artificial Sequence
  Description of Artificial Sequence: Synthetic probe
aatacaattccaaaaatccttcaaatataaacttatatcaacrattatac

SEQ ID NO: 402 - DNA, 50 bp, Artificial Sequence
  Description of Artificial Sequence: Synthetic probe
tttcctctaccaaataaacactcataaacaatctaaatccrcccataaac

SEQ ID NO: 403 - DNA, 50 bp, Artificial Sequence
  Description of Artificial Sequence: Synthetic probe
ttcctctaccaaataaacactcataaacaatctaaatccacccataaaca

SEQ ID NO: 404 - DNA, 50 bp, Artificial Sequence
  Description of Artificial Sequence: Synthetic probe
tacctactcrtaacraaatctttatcttcctccaatactaaaccctatac

SEQ ID NO: 405 - DNA, 50 bp, Artificial Sequence
  Description of Artificial Sequence: Synthetic probe
acctactcataacaaaatctttatcttcctccaatactaaaccctataca

SEQ ID NO: 406 - DNA, 50 bp, Artificial Sequence
  Description of Artificial Sequence: Synthetic probe
tatcaaaccataaacaaactaatcaccatcaacaaaaccaccaaaaatcc

SEQ ID NO: 407 - DNA, 50 bp, Artificial Sequence
  Description of Artificial Sequence: Synthetic probe
ctattcataaaataacrcaacctatccactaaaaaaattctatatataac

SEQ ID NO: 408 - DNA, 50 bp, Artificial Sequence
  Description of Artificial Sequence: Synthetic probe
aaacaaaaatcrcaccacraacaaacacraaacaactccaaacattcaac

SEQ ID NO: 409 - DNA, 50 bp, Artificial Sequence
  Description of Artificial Sequence: Synthetic probe
tctaccaaataaacactcataaacaacctaactctacccataaacraacc

SEQ ID NO: 410 - DNA, 50 bp, Artificial Sequence
  Description of Artificial Sequence: Synthetic probe
ccttaaaataaatacaacctactaaccccatttcaaaacttttcaattac

SEQ ID NO: 411 - DNA, 50 bp, Artificial Sequence
  Description of Artificial Sequence: Synthetic probe
aacactcaaattacttctaattaattcctcaacactaaaaataatactac

SEQ ID NO: 412 - DNA, 50 bp, Artificial Sequence
  Description of Artificial Sequence: Synthetic probe
aaaaatgttttttagagatttataatggatatatgtaagaggatgttygt

SEQ ID NO: 413 - DNA, 50 bp, Artificial Sequence
  Description of Artificial Sequence: Synthetic probe
actcaaattacttctaattaattcctcaacactaaaaataatactacrac

SEQ ID NO: 414 - DNA, 50 bp, Artificial Sequence
  Description of Artificial Sequence: Synthetic probe
tattttaccacatcattattaatatcttaaaatcaatatactaaaacaac

SEQ ID NO: 415 - DNA, 50 bp, Artificial Sequence
  Description of Artificial Sequence: Synthetic probe
tgtattttgaaagtttgggygtgttattaggtattttttttgtgagattt

SEQ ID NO: 416 - DNA, 50 bp, Artificial Sequence
  Description of Artificial Sequence: Synthetic probe
acattctaaaaacctaaacrtatcaccaaatatcctctttataaaacccc

SEQ ID NO: 417 - DNA, 50 bp, Artificial Sequence
  Description of Artificial Sequence: Synthetic probe
atcaatatactaaaacaacraaatctcacaaaaaaaatacctaataacac

SEQ ID NO: 418 - DNA, 50 bp, Artificial Sequence
  Description of Artificial Sequence: Synthetic probe
tgaatttggataagttattaaagttttatagtgtattttgaaagtttggg

SEQ ID NO: 419 - DNA, 50 bp, Artificial Sequence
  Description of Artificial Sequence: Synthetic probe
gattaatgtattggagtagyggggttttataaagaggatatttggtgata

SEQ ID NO: 420 - DNA, 50 bp, Artificial Sequence
  Description of Artificial Sequence: Synthetic probe
aaatccatcataaaacaaccttctctctatcatcacaaattattaatatc

SEQ ID NO: 421 - DNA, 50 bp, Artificial Sequence
  Description of Artificial Sequence: Synthetic probe
ctaaatctcaaaaactaaatctcaaaaactcaaatattcctcaaaactac

SEQ ID NO: 422 - DNA, 50 bp, Artificial Sequence
  Description of Artificial Sequence: Synthetic probe
aactctaatttcactaaataaactaaaatttatattttaacaaattacac

SEQ ID NO: 423 - DNA, 50 bp, Artificial Sequence
  Description of Artificial Sequence: Synthetic probe
ccttaaatcactataaattttaactaaaataaatttactccacattactc

SEQ ID NO: 424 - DNA, 50 bp, Artificial Sequence
  Description of Artificial Sequence: Synthetic probe
tttttacctattcttttctcatccataaaacataaaatatcaaccctacc

SEQ ID NO: 425 - DNA, 50 bp, Artificial Sequence
  Description of Artificial Sequence: Synthetic probe
taacaattttaaaaattataaaactattctatatcttaatataactcttc

SEQ ID NO: 426 - DNA, 50 bp, Artificial Sequence
  Description of Artificial Sequence: Synthetic probe
gtggtagttttgggggttatagaattgttttatattttgatatggttttt

SEQ ID NO: 427 - DNA, 50 bp, Artificial Sequence
  Description of Artificial Sequence: Synthetic probe
accaatatcttctctacatttcacccaaaaccataaactcataaccaccc

SEQ ID NO: 428 - DNA, 50 bp, Artificial Sequence
  Description of Artificial Sequence: Synthetic probe
aatctataaacctctcaccactcatacaaaccctaaaaacaaaaccattc

SEQ ID NO: 429 - DNA, 50 bp, Artificial Sequence
  Description of Artificial Sequence: Synthetic probe
aattcaactcccaaaactaatataaaccaccactcaactctatataacac

SEQ ID NO: 430 - DNA, 50 bp, Artificial Sequence
  Description of Artificial Sequence: Synthetic probe
attatttattaattatttgtagttygtggataaatggggaatattgagga

SEQ ID NO: 431 - DNA, 50 bp, Artificial Sequence
  Description of Artificial Sequence: Synthetic probe
ggatttaatttttaggattgatgtaggttattatttagttttgtgtgata

SEQ ID NO: 432 - DNA, 50 bp, Artificial Sequence
  Description of Artificial Sequence: Synthetic probe
aaaacaacraactaaaactactaacrccacctctaaatactacctctacc

SEQ ID NO: 433 - DNA, 50 bp, Artificial Sequence
  Description of Artificial Sequence: Synthetic probe
actacaacracaaaaacaacatccaaaaataacrccaacaattccaaccc

SEQ ID NO: 434 - DNA, 50 bp, Artificial Sequence
  Description of Artificial Sequence: Synthetic probe
ttaccctctatattctctaaaaactttctcttctacataataactatatc

SEQ ID NO: 435 - DNA, 50 bp, Artificial Sequence
  Description of Artificial Sequence: Synthetic probe
caaaaataacrccaacaattccaacccrttactttactttttactacacc

SEQ ID NO: 436 - DNA, 50 bp, Artificial Sequence
  Description of Artificial Sequence: Synthetic probe
acraaatctcatcaaaatatattatttcctaaactaaaactccataaaac

SEQ ID NO: 437 - DNA, 50 bp, Artificial Sequence
  Description of Artificial Sequence: Synthetic probe
tagagttttgagaaattagatttttgttttaagggttaggaattttatgt

SEQ ID NO: 438 - DNA, 50 bp, Artificial Sequence
  Description of Artificial Sequence: Synthetic probe
aaaatcttaaaaaaccaaattcttatctcaaaaatcaaaaatcctatacc

SEQ ID NO: 439 - DNA, 50 bp, Artificial Sequence
  Description of Artificial Sequence: Synthetic probe
atccatccttcccaaaaaaatactaaattactcttctaaaactaaaaaac

SEQ ID NO: 440 - DNA, 50 bp, Artificial Sequence
  Description of Artificial Sequence: Synthetic probe
aaaacaaataaaaaacraaatcctaacacacattttataaacaaacactc

SEQ ID NO: 441 - DNA, 50 bp, Artificial Sequence
  Description of Artificial Sequence: Synthetic probe
caaaaaaaacctatatccattaacaataacttctcaatatctcccaaccc

SEQ ID NO: 442 - DNA, 50 bp, Artificial Sequence
  Description of Artificial Sequence: Synthetic probe
acaaaatcaactcaaatttaatccaccraatctacttaccataataaatc

SEQ ID NO: 443 - DNA, 50 bp, Artificial Sequence
  Description of Artificial Sequence: Synthetic probe
ctactaacttctcatctactctacttcctaaaaaacrtatctattactac

SEQ ID NO: 444 - DNA, 50 bp, Artificial Sequence
  Description of Artificial Sequence: Synthetic probe
catctactctacttcctaaaaaacrtatctattactacrtctaaacccac

SEQ ID NO: 445 - DNA, 50 bp, Artificial Sequence
  Description of Artificial Sequence: Synthetic probe
tttacaatctttatacatatctatctaatctataaacaatataaaaatac

SEQ ID NO: 446 - DNA, 50 bp, Artificial Sequence
  Description of Artificial Sequence: Synthetic probe
aaactaaaaactactccatacacrctccataaatctactacaaaccaacc

SEQ ID NO: 447 - DNA, 50 bp, Artificial Sequence
  Description of Artificial Sequence: Synthetic probe
ctaaacaaaaaccaaaaaaaatcccacaaactaaaaactactccatacac

SEQ ID NO: 448 - DNA, 50 bp, Artificial Sequence
  Description of Artificial Sequence: Synthetic probe
ctaacaactcctacatcctccactaaaccatataaatacttaacaaaaac

SEQ ID NO: 449 - DNA, 50 bp, Artificial Sequence
  Description of Artificial Sequence: Synthetic probe
cctaccttcttctatctctcttttcacacaatcctattacccctaaaacc

SEQ ID NO: 450 - DNA, 50 bp, Artificial Sequence
  Description of Artificial Sequence: Synthetic probe
tatctcctaaaaactcaccaaacttttctcctcaaattaatacacccctc

SEQ ID NO: 451 - DNA, 50 bp, Artificial Sequence
  Description of Artificial Sequence: Synthetic probe
cactaaccaacaaaacaaaatcatttaacaacaaactcatccaacaaacc

SEQ ID NO: 452 - DNA, 50 bp, Artificial Sequence
  Description of Artificial Sequence: Synthetic probe
atagaaggtttgaatttttattaggagtatttggggagtttattgaaaga

SEQ ID NO: 453 - DNA, 50 bp, Artificial Sequence
  Description of Artificial Sequence: Synthetic probe
tatcaaataatcttattttactaatcaataaactacctacacataaacac

SEQ ID NO: 454 - DNA, 50 bp, Artificial Sequence
  Description of Artificial Sequence: Synthetic probe
actaaaaaaaacacaaaacaacctcactcrtctacttatatcaaatacac

SEQ ID NO: 455 - DNA, 50 bp, Artificial Sequence
  Description of Artificial Sequence: Synthetic probe
tacaccctaacaccatacttaactaaaaaaaacacaaaacaacctcactc

SEQ ID NO: 456 - DNA, 50 bp, Artificial Sequence
  Description of Artificial Sequence: Synthetic probe
taatcaataaactacctacacataaacacrtacatctaacacaaacaaac

SEQ ID NO: 457 - DNA, 50 bp, Artificial Sequence
  Description of Artificial Sequence: Synthetic probe
caaaatatatacctacaaccctcacrttatatttacaataccccaactac

SEQ ID NO: 458 - DNA, 50 bp, Artificial Sequence
  Description of Artificial Sequence: Synthetic probe
tatgtttgtaatgttttagttgygtagatttttaagtatggtagaatgtt

SEQ ID NO: 459 - DNA, 50 bp, Artificial Sequence
  Description of Artificial Sequence: Synthetic probe
atatttacaataccccaactacrtaaatctttaaatataacaaaatatcc

SEQ ID NO: 460 - DNA, 50 bp, Artificial Sequence
  Description of Artificial Sequence: Synthetic probe
gttatttaagatggagtaagttagaaagtttaaggtttttaattagaaga

SEQ ID NO: 461 - DNA, 50 bp, Artificial Sequence
  Description of Artificial Sequence: Synthetic probe
cactcaacaccatctacattcacaaaatatcaaaacattcactaaaaaac

SEQ ID NO: 462 - DNA, 50 bp, Artificial Sequence
  Description of Artificial Sequence: Synthetic probe
acttttcttcctccaccctcaactttcatccaaatatcctaacttaattc

SEQ ID NO: 463 - DNA, 50 bp, Artificial Sequence
  Description of Artificial Sequence: Synthetic probe
gatgtgttttttgatagatttagggtaggtttaatagattaattttgggt

SEQ ID NO: 464 - DNA, 50 bp, Artificial Sequence
  Description of Artificial Sequence: Synthetic probe
aaaataaaactctaaaactctacatcrctccacrtaaaataaaaaatccc

SEQ ID NO: 465 - DNA, 50 bp, Artificial Sequence
  Description of Artificial Sequence: Synthetic probe
aacataataaacccttaaaaaatataatacctacatatacrtcaataaac

SEQ ID NO: 466 - DNA, 50 bp, Artificial Sequence
  Description of Artificial Sequence: Synthetic probe
caccccaccccccatcttaaaaaacaactataacttcaaaatacctattc

SEQ ID NO: 467 - DNA, 50 bp, Artificial Sequence
  Description of Artificial Sequence: Synthetic probe
ttattaacrcatatataaacatcacattttttaaaaatctatcatatcac

SEQ ID NO: 468 - DNA, 50 bp, Artificial Sequence
  Description of Artificial Sequence: Synthetic probe
tattgagttagttagtaaaataatataaggaaaaagtttggtagaaggtt

SEQ ID NO: 469 - DNA, 50 bp, Artificial Sequence
  Description of Artificial Sequence: Synthetic probe
ttatacaaaaccttctaccccattcttcctaataaatcccaaccttaacc

SEQ ID NO: 470 - DNA, 50 bp, Artificial Sequence
  Description of Artificial Sequence: Synthetic probe
ctaatcaacctaaaaaatttataaacaaatcccaaacccataaaaatatc

SEQ ID NO: 471 - DNA, 50 bp, Artificial Sequence
  Description of Artificial Sequence: Synthetic probe
aactaaaaccataaacaaaaaaccaaaaactcctttaaacttataaaacc

SEQ ID NO: 472 - DNA, 50 bp, Artificial Sequence
  Description of Artificial Sequence: Synthetic probe
cttaaaaataatatctaaatcaaaataaacataataaccctaaccaaaac

SEQ ID NO: 473 - DNA, 50 bp, Artificial Sequence
  Description of Artificial Sequence: Synthetic probe
catataaaatcaaataactaacaaaaccccrtcctaaaccataaaaaaac

SEQ ID NO: 474 - DNA, 50 bp, Artificial Sequence
  Description of Artificial Sequence: Synthetic probe
ttataatttaaaaaataatacaaactaaataatttcaacaatcccatctc

SEQ ID NO: 475 - DNA, 50 bp, Artificial Sequence
  Description of Artificial Sequence: Synthetic probe
ttatataagtaaaattttggaagtataattyggtttaggattaggttttg

SEQ ID NO: 476 - DNA, 50 bp, Artificial Sequence
  Description of Artificial Sequence: Synthetic probe
atacataaaaacctcaaaaattaatacttcaacttcaacccaaactacac

SEQ ID NO: 477 - DNA, 50 bp, Artificial Sequence
  Description of Artificial Sequence: Synthetic probe
aaacttaaaacctatctcatttctatctcttccraaatacctaatactcc

SEQ ID NO: 478 - DNA, 50 bp, Artificial Sequence
  Description of Artificial Sequence: Synthetic probe
aaattaatacttcaacttcaacccaaactacacraaacatcaaatacttc

SEQ ID NO: 479 - DNA, 50 bp, Artificial Sequence
  Description of Artificial Sequence: Synthetic probe
gggattagtattttaattttaatttaggttgtayggagtattaggtattt

SEQ ID NO: 480 - DNA, 50 bp, Artificial Sequence
  Description of Artificial Sequence: Synthetic probe
tttttaggtttaaggtagttatttttaggtaggaaagtgtttatttgaaa

SEQ ID NO: 481 - DNA, 50 bp, Artificial Sequence
  Description of Artificial Sequence: Synthetic probe
accttatatttctaataacacttacttatatttatttttcaatatctatc

SEQ ID NO: 482 - DNA, 50 bp, Artificial Sequence
  Description of Artificial Sequence: Synthetic probe
aaaaataaaaaataaacccataaacactaaaatttcattctatccaaaac

SEQ ID NO: 483 - DNA, 50 bp, Artificial Sequence
  Description of Artificial Sequence: Synthetic probe
tacctctaccatataaaacaaaaaattcctatcaaacataaaacacttcc

SEQ ID NO: 484 - DNA, 50 bp, Artificial Sequence
  Description of Artificial Sequence: Synthetic probe
aatcaccatcatccaccttaactaatccaaaacataacttaataatcccc

SEQ ID NO: 485 - DNA, 50 bp, Artificial Sequence
  Description of Artificial Sequence: Synthetic probe
catcataaaaaatcccaactacaaacraatttaaaatacttccactctac

SEQ ID NO: 486 - DNA, 50 bp, Artificial Sequence
  Description of Artificial Sequence: Synthetic probe
acaactttaaaatctccattaccccctctaaccatatattcctaacctac

SEQ ID NO: 487 - DNA, 50 bp, Artificial Sequence
  Description of Artificial Sequence: Synthetic probe
cctctaaccatatattcctaacctacrtaaaataaaaatatcctaaatcc

SEQ ID NO: 488 - DNA, 50 bp, Artificial Sequence
  Description of Artificial Sequence: Synthetic probe
ctaaaatattaatcaaccatataacatcataaaaaatcccaactacaaac

SEQ ID NO: 489 - DNA, 50 bp, Artificial Sequence
  Description of Artificial Sequence: Synthetic probe
ataactaaacatctaaaatcacaaatattaaatcaacacaaacactaatc

SEQ ID NO: 490 - DNA, 50 bp, Artificial Sequence
  Description of Artificial Sequence: Synthetic probe
atacttaaattattaattcccatcttattaataatacctacaaaaacccc

SEQ ID NO: 491 - DNA, 50 bp, Artificial Sequence
  Description of Artificial Sequence: Synthetic probe
tatgattgggtatttaaagttatagatgttagattaatataggtattgat

SEQ ID NO: 492 - DNA, 50 bp, Artificial Sequence
  Description of Artificial Sequence: Synthetic probe
cctcttaaccctaaacaaacrataaaactacraataaatacactataaac

SEQ ID NO: 493 - DNA, 50 bp, Artificial Sequence
  Description of Artificial Sequence: Synthetic probe
ctataactcattctctctaattaaatacaatatatatataaaaaactccc

SEQ ID NO: 494 - DNA, 50 bp, Artificial Sequence
  Description of Artificial Sequence: Synthetic probe
tttttttaattttgggtaaaygatgggattayggatagatatattgtgag

SEQ ID NO: 495 - DNA, 50 bp, Artificial Sequence
  Description of Artificial Sequence: Synthetic probe
tataaacattaatcaacactaaaatatttaataatcattattttcraatc

SEQ ID NO: 496 - DNA, 50 bp, Artificial Sequence
  Description of Artificial Sequence: Synthetic probe
tcacttacttattatctatctttcccactaaaaaataaactaaaaacaac

SEQ ID NO: 497 - DNA, 50 bp, Artificial Sequence
  Description of Artificial Sequence: Synthetic probe
catatcaatctctccctaaaaaatatattcttacctcactaaaaaccttc

SEQ ID NO: 498 - DNA, 50 bp, Artificial Sequence
  Description of Artificial Sequence: Synthetic probe
tttatttaaagtatgtgtaagtgtttggtataaaatgtatggttaatagt

SEQ ID NO: 499 - DNA, 50 bp, Artificial Sequence
  Description of Artificial Sequence: Synthetic probe
ttatttaaaatatatacaaatatttaacacaaaatacataatcaacaatc

SEQ ID NO: 500 - DNA, 50 bp, Artificial Sequence
  Description of Artificial Sequence: Synthetic probe
ctaccactctctatctattctactattaaaaaaatcrttaaaccccattc

SEQ ID NO: 501 - DNA, 50 bp, Artificial Sequence
  Description of Artificial Sequence: Synthetic probe
taaaaaaatttaaaaataaacactatctactataaccaaccaatttcccc

SEQ ID NO: 502 - DNA, 50 bp, Artificial Sequence
  Description of Artificial Sequence: Synthetic probe
acaaaaaataacaactaccactctctatctattctactattaaaaaaatc

SEQ ID NO: 503 - DNA, 50 bp, Artificial Sequence
  Description of Artificial Sequence: Synthetic probe
aataaacactatctactataaccaaccaatttccccraataaaacctaac

SEQ ID NO: 504 - DNA, 50 bp, Artificial Sequence
  Description of Artificial Sequence: Synthetic probe
acttttaacttaaatccctaacatctaaaataatcccaaacaaacattcc

SEQ ID NO: 505 - DNA, 50 bp, Artificial Sequence
  Description of Artificial Sequence: Synthetic probe
ctatccttcctcaaattttaaattttactcacccccaaaactaatataac

SEQ ID NO: 506 - DNA, 50 bp, Artificial Sequence
  Description of Artificial Sequence: Synthetic probe
ctccataataaacaaatcactatcattaaataaaaaccataactaataac

SEQ ID NO: 507 - DNA, 50 bp, Artificial Sequence
  Description of Artificial Sequence: Synthetic probe
cratactatccccatctacccattaaaaattaaaatactaaaaaatattc

SEQ ID NO: 508 - DNA, 50 bp, Artificial Sequence
  Description of Artificial Sequence: Synthetic probe
attcacatcatcttctacctataccccaaaaaaacctcacaaaacacttc

SEQ ID NO: 509 - DNA, 50 bp, Artificial Sequence
  Description of Artificial Sequence: Synthetic probe
tcctcaatacacaatacaaatatccttcctattccaaaaaaacaattcac

SEQ ID NO: 510 - DNA, 50 bp, Artificial Sequence
  Description of Artificial Sequence: Synthetic probe
tcatacttattatttcatttcatcttcataacccctctaaaaaaaatatc

SEQ ID NO: 511 - DNA, 50 bp, Artificial Sequence
  Description of Artificial Sequence: Synthetic probe
atacccaactccttccaccaaattctaaaaaccccttattctacttcaac

SEQ ID NO: 512 - DNA, 50 bp, Artificial Sequence
  Description of Artificial Sequence: Synthetic probe
atccttacatctcaaacatataaataactcctcctttcccaatattccac

SEQ ID NO: 513 - DNA, 50 bp, Artificial Sequence
  Description of Artificial Sequence: Synthetic probe
actattcacatacctaaaatataaaaatatctaaattttccaaaaaccrc

SEQ ID NO: 514 - DNA, 50 bp, Artificial Sequence
  Description of Artificial Sequence: Synthetic probe
cctactttaaaaataaattactttcactataaaaaacrccttaaaatacc

SEQ ID NO: 515 - DNA, 50 bp, Artificial Sequence
  Description of Artificial Sequence: Synthetic probe
ataaaaaactcttaattcrtctcaaaatataacrtttttctaactccctc

SEQ ID NO: 516 - DNA, 50 bp, Artificial Sequence
  Description of Artificial Sequence: Synthetic probe
cctcaacttccctacacccaaacrctcattaaaacaacatattttatctc

SEQ ID NO: 517 - DNA, 50 bp, Artificial Sequence
  Description of Artificial Sequence: Synthetic probe
ctcacttaaaactaacrccattttaaacctcaacttccctacacccaaac

SEQ ID NO: 518 - DNA, 50 bp, Artificial Sequence
  Description of Artificial Sequence: Synthetic probe
accctattttcacacrttacccactacacatattttctaaaaaactctcc

SEQ ID NO: 519 - DNA, 50 bp, Artificial Sequence
  Description of Artificial Sequence: Synthetic probe
aaataatattaacacraaaaaccttccaaaaaacatatacaataaacaac

SEQ ID NO: 520 - DNA, 50 bp, Artificial Sequence
  Description of Artificial Sequence: Synthetic probe
taccaccaaaaattcctctacttaaccattattctaccttccatcttcac

SEQ ID NO: 521 - DNA, 50 bp, Artificial Sequence
  Description of Artificial Sequence: Synthetic probe
actaacaccccaaaacctaataaaacattatcccaaaaaattaaacaaac

SEQ ID NO: 522 - DNA, 50 bp, Artificial Sequence
  Description of Artificial Sequence: Synthetic probe
ttttttaaaatctactatcatataaactcaaaaatttatattaatcactc

SEQ ID NO: 523 - DNA, 50 bp, Artificial Sequence
  Description of Artificial Sequence: Synthetic probe
cttccttcaaatataaaaattttcataatttctttaaaacaatctcattc

SEQ ID NO: 524 - DNA, 50 bp, Artificial Sequence
  Description of Artificial Sequence: Synthetic probe
cctcctaaacctaaattcaaacaccctatatctaaacctacccacctttc

SEQ ID NO: 525 - DNA, 50 bp, Artificial Sequence
  Description of Artificial Sequence: Synthetic probe
ctataatattaattataaaatcaccataacaaacttcctctaaaattacc

SEQ ID NO: 526 - DNA, 50 bp, Artificial Sequence
  Description of Artificial Sequence: Synthetic probe
ctaatacttaccccratcccacataaataactcctcctattattcatatc

SEQ ID NO: 527 - DNA, 50 bp, Artificial Sequence
  Description of Artificial Sequence: Synthetic probe
aatatcraaataacracataaacaataaaaaaaaccatccatataaaatc

SEQ ID NO: 528 - DNA, 50 bp, Artificial Sequence
  Description of Artificial Sequence: Synthetic probe
cctacaatactccctatacctactattctctttacrctaatacttacccc

SEQ ID NO: 529 - DNA, 50 bp, Artificial Sequence
  Description of Artificial Sequence: Synthetic probe
acataaacaataaaaaaaaccatccatataaaatcraaataaatatcaac

SEQ ID NO: 530 - DNA, 50 bp, Artificial Sequence
  Description of Artificial Sequence: Synthetic probe
aacaaatacaaaaaatactacaaatcaaactacccctaaaaccttaactc

SEQ ID NO: 531 - DNA, 50 bp, Artificial Sequence
  Description of Artificial Sequence: Synthetic probe
atttaaataaactaaaaattaaccaaaatctaccttcaaatacaacatcc

SEQ ID NO: 532 - DNA, 50 bp, Artificial Sequence
  Description of Artificial Sequence: Synthetic probe
tctaaatacaataaaataacctttatcaaccaatccctaaaaaaatatcc

SEQ ID NO: 533 - DNA, 50 bp, Artificial Sequence
  Description of Artificial Sequence: Synthetic probe
ttttgaatatagtaaaatagtttttgttagttagtttttgaagggatgtt

SEQ ID NO: 534 - DNA, 50 bp, Artificial Sequence
  Description of Artificial Sequence: Synthetic probe
acctccrcttttcatctttaccaaaatctactccraatttaacaaaaaac

SEQ ID NO: 535 - DNA, 50 bp, Artificial Sequence
  Description of Artificial Sequence: Synthetic probe
aacaaaaaaaaactaactattaaatacaaaacacrcttcttatcaaaccc

SEQ ID NO: 536 - DNA, 50 bp, Artificial Sequence
  Description of Artificial Sequence: Synthetic probe
aaaaattattcaatcattaactatatatacattctactttaatcataacc

SEQ ID NO: 537 - DNA, 50 bp, Artificial Sequence
  Description of Artificial Sequence: Synthetic probe
cactaaaactaattcaataacataacccatactaaaataaacattaaatc

SEQ ID NO: 538 - DNA, 50 bp, Artificial Sequence
  Description of Artificial Sequence: Synthetic probe
ttattggggttgatttagtgatatggtttatattaaaatgggtattgggt

SEQ ID NO: 539 - DNA, 50 bp, Artificial Sequence
  Description of Artificial Sequence: Synthetic probe
aaacaaaaataaacaacactcaaactaaaaaatccataataaacataatc

SEQ ID NO: 540 - DNA, 50 bp, Artificial Sequence
  Description of Artificial Sequence: Synthetic probe
aacaaaaataaacaacactcaaactaaaaaatccataataaacataatca

SEQ ID NO: 541 - DNA, 50 bp, Artificial Sequence
  Description of Artificial Sequence: Synthetic probe
cttaacttctcaatcttaccatcacrtccratatatttataaaacatatc

SEQ ID NO: 542 - DNA, 50 bp, Artificial Sequence
  Description of Artificial Sequence: Synthetic probe
ttaacttctcaatcttaccatcacatccaatatatttataaaacatatca

SEQ ID NO: 543 - DNA, 50 bp, Artificial Sequence
  Description of Artificial Sequence: Synthetic probe
atggttagtaaagtgtgtagtttgaggatagtgtatagtttttttttagt

SEQ ID NO: 544 - DNA, 50 bp, Artificial Sequence
  Description of Artificial Sequence: Synthetic probe
ataatcaacaaaatatacaacttaaaaacaatacacaatcccctcccaac

SEQ ID NO: 545 - DNA, 50 bp, Artificial Sequence
  Description of Artificial Sequence: Synthetic probe
taatcaacaaaatatacaacttaaaaacaatacacaatcccctcccaaca

SEQ ID NO: 546 - DNA, 50 bp, Artificial Sequence
  Description of Artificial Sequence: Synthetic probe
tttgttgggagatatagtygtagattattataagtagagttatggagygg

SEQ ID NO: 547 - DNA, 50 bp, Artificial Sequence
  Description of Artificial Sequence: Synthetic probe
ttgttgggagatatagttgtagattattataagtagagttatggagtggt

SEQ ID NO: 548 - DNA, 50 bp, Artificial Sequence
  Description of Artificial Sequence: Synthetic probe
ttactaaaaaacataaccrcaaactaccacaaacaaaaccataaaacrac

SEQ ID NO: 549 - DNA, 50 bp, Artificial Sequence
  Description of Artificial Sequence: Synthetic probe
tactaaaaaacataaccacaaactaccacaaacaaaaccataaaacaaca

SEQ ID NO: 550 - DNA, 50 bp, Artificial Sequence
  Description of Artificial Sequence: Synthetic probe
aaagtaaagatgagtaatatttaagttgagaggtttataataggtatgat

SEQ ID NO: 551 - DNA, 50 bp, Artificial Sequence
  Description of Artificial Sequence: Synthetic probe
aagtaaagatgagtaatatttaagttgagaggtttataataggtatgatt

SEQ ID NO: 552 - DNA, 50 bp, Artificial Sequence
  Description of Artificial Sequence: Synthetic probe
gtaygagtagttgttttaattygagtattggattttgtttttygtttgga

SEQ ID NO: 553 - DNA, 50 bp, Artificial Sequence
  Description of Artificial Sequence: Synthetic probe
cacraacaactatcttaacccraatattaaaccttacctcccrcctaaac

SEQ ID NO: 554 - DNA, 50 bp, Artificial Sequence
  Description of Artificial Sequence: Synthetic probe
gttttaatggtagtagaattattgatagagttagaggagtttattgagat

SEQ ID NO: 555 - DNA, 50 bp, Artificial Sequence
  Description of Artificial Sequence: Synthetic probe
tcctaataacaacaaaaccactaacaaaactaaaaaaatccattaaaacc

SEQ ID NO: 556 - DNA, 50 bp, Artificial Sequence
  Description of Artificial Sequence: Synthetic probe
aaaaaaatttctaaaactaaatctcctacccccaccaaaactaaaatacc

SEQ ID NO: 557 - DNA, 50 bp, Artificial Sequence
  Description of Artificial Sequence: Synthetic probe
aacaaaaaattcaactccaaaaaccccctcttctataaatctcacaatcc

SEQ ID NO: 558 - DNA, 50 bp, Artificial Sequence
  Description of Artificial Sequence: Synthetic probe
aaaaaaccttcaactaaaaacctcctctcaaataaaaaaatctccaaatc

SEQ ID NO: 559 - DNA, 50 bp, Artificial Sequence
  Description of Artificial Sequence: Synthetic probe
aatcctttttaaatatctataacttaaaaacccctctataataatccctc

SEQ ID NO: 560 - DNA, 50 bp, Artificial Sequence
  Description of Artificial Sequence: Synthetic probe
aattaaaaatccttcttaaaatccttcaaatctaataacccctctataac

SEQ ID NO: 561 - DNA, 50 bp, Artificial Sequence
  Description of Artificial Sequence: Synthetic probe
atctccaaaacttatttatattaaaccctaatctccraccactcrcatcc

SEQ ID NO: 562 - DNA, 50 bp, Artificial Sequence
  Description of Artificial Sequence: Synthetic probe
taaccacaaaaaacatttaccaaaccctatacttctctactaaaaaaaac

SEQ ID NO: 563 - DNA, 50 bp, Artificial Sequence
  Description of Artificial Sequence: Synthetic probe
ccctataatcaaaactaactccrtctaaacaaacccattttctctacccc

SEQ ID NO: 564 - DNA, 50 bp, Artificial Sequence
  Description of Artificial Sequence: Synthetic probe
crataacaaaaatcctaaaacraaacrtctctaactccctactccaaaac

SEQ ID NO: 565 - DNA, 50 bp, Artificial Sequence
  Description of Artificial Sequence: Synthetic probe
aaaaaaaataatctccaacctccctccaaaatcaaccataaaactcaccc

SEQ ID NO: 566 - DNA, 50 bp, Artificial Sequence
  Description of Artificial Sequence: Synthetic probe
attaaactatctctaatcttcaaaatcraccacraaaatttaacacctcc

SEQ ID NO: 567 - DNA, 50 bp, Artificial Sequence
  Description of Artificial Sequence: Synthetic probe
aaaaactcaaaacaaacracctaattaaactatctctaatcttcaaaatc

SEQ ID NO: 568 - DNA, 50 bp, Artificial Sequence
  Description of Artificial Sequence: Synthetic probe
crtataactaacaaaaaacccraatccaaacctaaaaactcaaaacaaac

SEQ ID NO: 569 - DNA, 50 bp, Artificial Sequence
  Description of Artificial Sequence: Synthetic probe
tgttaaattttygtggtygattttgaagattagagatagtttaattaggt

SEQ ID NO: 570 - DNA, 50 bp, Artificial Sequence
  Description of Artificial Sequence: Synthetic probe
atcaaatttccrtaatcrattctaaaaaccaaaaacaacccaatcaaacc

SEQ ID NO: 571 - DNA, 50 bp, Artificial Sequence
  Description of Artificial Sequence: Synthetic probe
ctatatataaataataacccaacatccttacccatataaaaataaaaatc

SEQ ID NO: 572 - DNA, 50 bp, Artificial Sequence
  Description of Artificial Sequence: Synthetic probe
tatataaacactataaaaactaaaactccaacattaaacaaaataaccac

SEQ ID NO: 573 - DNA, 50 bp, Artificial Sequence
  Description of Artificial Sequence: Synthetic probe
tttgtgtgtaagtaatggtttagtatttttatttatgtgagggtaaggat

SEQ ID NO: 574 - DNA, 50 bp, Artificial Sequence
  Description of Artificial Sequence: Synthetic probe
aaaaataaaaaaataacacatctacaacccttcctctactccactaacac

SEQ ID NO: 575 - DNA, 50 bp, Artificial Sequence
  Description of Artificial Sequence: Synthetic probe
atatataygtataygtttaagtgttaggaaggaaaatgaaagggttttga

SEQ ID NO: 576 - DNA, 50 bp, Artificial Sequence
  Description of Artificial Sequence: Synthetic probe
aatcacctaaacccaataaatcaaaactacaataatccrtaattcattac

SEQ ID NO: 577 - DNA, 50 bp, Artificial Sequence
  Description of Artificial Sequence: Synthetic probe
aatactatttactccttcttaaaataaaacacctttacrtcctcrattac

SEQ ID NO: 578 - DNA, 50 bp, Artificial Sequence
  Description of Artificial Sequence: Synthetic probe
aacctaaatactatttactccttcttaaaataaaacacctttacrtcctc

SEQ ID NO: 579 - DNA, 50 bp, Artificial Sequence
  Description of Artificial Sequence: Synthetic probe
caacttaacctaaatactatttactccttcttaaaataaaacacctttac

SEQ ID NO: 580 - DNA, 50 bp, Artificial Sequence
  Description of Artificial Sequence: Synthetic probe
aaaaatttactcctaatactaacctcctaaaccttaactaaaacatttac

SEQ ID NO: 581 - DNA, 50 bp, Artificial Sequence
  Description of Artificial Sequence: Synthetic probe
ctaattttcccctcataaccactcrcccaatctaaaaattataaaatacc

SEQ ID NO: 582 - DNA, 50 bp, Artificial Sequence
  Description of Artificial Sequence: Synthetic probe
raacaattaaacctaaaaaatttacactaattttcccctcataaccactc

SEQ ID NO: 583 - DNA, 50 bp, Artificial Sequence
  Description of Artificial Sequence: Synthetic probe
ctaaaccttaactaaaacatttacracacttcacaactctcaaactaaac

SEQ ID NO: 584 - DNA, 50 bp, Artificial Sequence
  Description of Artificial Sequence: Synthetic probe
aaaaaaaaaaccaatacaaattccccaaacccaattatccraaaaaaaac

SEQ ID NO: 585 - DNA, 50 bp, Artificial Sequence
  Description of Artificial Sequence: Synthetic probe
rttccctaaccaaaatacaccrtctaaaaatctttacrcraacttacctc

SEQ ID NO: 586 - DNA, 50 bp, Artificial Sequence
  Description of Artificial Sequence: Synthetic probe
tgaggggaaaattagtgtaaattttttaggtttaattgttyggaagaaga

SEQ ID NO: 587 - DNA, 50 bp, Artificial Sequence
  Description of Artificial Sequence: Synthetic probe
aataattattaatataaaccttaaaaaaaatttaaatcccraattccctc

SEQ ID NO: 588 - DNA, 50 bp, Artificial Sequence
  Description of Artificial Sequence: Synthetic probe
accttaaaacraaaacraaactttccatacaataccccrcccctaaaaac

SEQ ID NO: 589 - DNA, 50 bp, Artificial Sequence
  Description of Artificial Sequence: Synthetic probe
tattggaaygtgaagttttyggtaygttttaataataggattattggtta

SEQ ID NO: 590 - DNA, 50 bp, Artificial Sequence
  Description of Artificial Sequence: Synthetic probe
ccaatacttatctaaccractaaaataacrtctacrcaattacrtcaaac

SEQ ID NO: 591 - DNA, 50 bp, Artificial Sequence
  Description of Artificial Sequence: Synthetic probe
rccacrtccaatacttatctaaccractaaaataacrtctacrcaattac

SEQ ID NO: 592 - DNA, 50 bp, Artificial Sequence
  Description of Artificial Sequence: Synthetic probe
taaaataaaatggtygttaygtttagtgtttgtttgatyggttaaaatgg

SEQ ID NO: 593 - DNA, 50 bp, Artificial Sequence
  Description of Artificial Sequence: Synthetic probe
aaaacaaaataaccrccacrtccaatacttatctaaccractaaaataac

SEQ ID NO: 594 - DNA, 50 bp, Artificial Sequence
  Description of Artificial Sequence: Synthetic probe
tactcratatccaaaacaaaataaccrccacrtccaatacttatctaacc

SEQ ID NO: 595 - DNA, 50 bp, Artificial Sequence
  Description of Artificial Sequence: Synthetic probe
ttgttyggtgtttaaaataaaatggtygttaygtttagtgtttgtttgat

SEQ ID NO: 596 - DNA, 50 bp, Artificial Sequence
  Description of Artificial Sequence: Synthetic probe
aaacctctattcttaattacatctcatataatacacaaaacaaattaaac

SEQ ID NO: 597 - DNA, 50 bp, Artificial Sequence
  Description of Artificial Sequence: Synthetic probe
tactataaccaaaataccatactaccrtactacacraccccaatatcaac

SEQ ID NO: 598 - DNA, 50 bp, Artificial Sequence
  Description of Artificial Sequence: Synthetic probe
caatttctatctctaacaactttattcattaaaaatacctttatttaaac

SEQ ID NO: 599 - DNA, 50 bp, Artificial Sequence
  Description of Artificial Sequence: Synthetic probe
atttctatctctaacaactttattcattaaaaatacctttatttaaacrc

SEQ ID NO: 600 - DNA, 50 bp, Artificial Sequence
  Description of Artificial Sequence: Synthetic probe
aaaatcaacttaataaaatcactaatcaaaaacattcttttttttaaaac

SEQ ID NO: 601 - DNA, 50 bp, Artificial Sequence
  Description of Artificial Sequence: Synthetic probe
acrtatttttcataccttccacctctctaaaaaccrttacctaaaccctc

SEQ ID NO: 602 - DNA, 50 bp, Artificial Sequence
  Description of Artificial Sequence: Synthetic probe
raaaaacccraacraaacttacaacaatccaaaaaaccaacaccraaaac

SEQ ID NO: 603 - DNA, 50 bp, Artificial Sequence
  Description of Artificial Sequence: Synthetic probe
caataaatatcraatttctaaaaaaaccaatcaacrtcrccacractccc

SEQ ID NO: 604 - DNA, 50 bp, Artificial Sequence
  Description of Artificial Sequence: Synthetic probe
tagtttttgagttttgagaattttttgagttyggatggggattttatagt

SEQ ID NO: 605 - DNA, 50 bp, Artificial Sequence
  Description of Artificial Sequence: Synthetic probe
aaaccctatctctactaacaatacaaaaattaaccaaatataataataca

SEQ ID NO: 606 - DNA, 50 bp, Artificial Sequence
  Description of Artificial Sequence: Synthetic probe
ttatcatcataacccattctcaataaactattaaatacacctcccaaaca

SEQ ID NO: 607 - DNA, 50 bp, Artificial Sequence
  Description of Artificial Sequence: Synthetic probe
aaaaatcccaactaatacaacataaaatataaaaaaacccaaccaatttc

SEQ ID NO: 608 - DNA, 50 bp, Artificial Sequence
  Description of Artificial Sequence: Synthetic probe
aaacacaaaccttattatatctcacatattataaaccaaaaatttaaaac

SEQ ID NO: 609 - DNA, 50 bp, Artificial Sequence
  Description of Artificial Sequence: Synthetic probe
aaaactacatttataatcaaaatccacaacttatctccctcccacraccc

SEQ ID NO: 610 - DNA, 50 bp, Artificial Sequence
  Description of Artificial Sequence: Synthetic probe
atcatctctctttccatctactaatctttcccataaaataattattaacc

SEQ ID NO: 611 - DNA, 50 bp, Artificial Sequence
  Description of Artificial Sequence: Synthetic probe
attttattttatggaagatagaggagatttggagaaatttttaatgaaga

SEQ ID NO: 612 - DNA, 50 bp, Artificial Sequence
  Description of Artificial Sequence: Synthetic probe
cttcattaaaaatttctccaaatctcctctatcttccataaaataaaatc

SEQ ID NO: 613 - DNA, 50 bp, Artificial Sequence
  Description of Artificial Sequence: Synthetic probe
ataaccaatactatacctacatataaaacactatacaatattctacccac

SEQ ID NO: 614 - DNA, 50 bp, Artificial Sequence
  Description of Artificial Sequence: Synthetic probe
caaaaatcaattaaattcctttacaactctaaatttctattctaaatcac

SEQ ID NO: 615 - DNA, 50 bp, Artificial Sequence
  Description of Artificial Sequence: Synthetic probe
aacataaaacacaaataaataaatttactactttcaaaataaacctaaac

SEQ ID NO: 616 - DNA, 50 bp, Artificial Sequence
  Description of Artificial Sequence: Synthetic probe
attaccacaaaataacaataacttcacataatatacraaaacaactaacc

SEQ ID NO: 617 - DNA, 50 bp, Artificial Sequence
  Description of Artificial Sequence: Synthetic probe
ttagaatagaaatttagagttgtaaaggaatttaattgatttttgtaggt

SEQ ID NO: 618 - DNA, 50 bp, Artificial Sequence
  Description of Artificial Sequence: Synthetic probe
aaaactataaaaaaacttaattaatttctacaaatcrattaattacttcc

SEQ ID NO: 619 - DNA, 50 bp, Artificial Sequence
  Description of Artificial Sequence: Synthetic probe
gtgtagtgtttaggtattgttataaggtggtagtaattttatataatgtg

SEQ ID NO: 620 - DNA, 50 bp, Artificial Sequence
  Description of Artificial Sequence: Synthetic probe
tagagttgtaaaggaatttaattgatttttgtaggtyggttagttgtttt

SEQ ID NO: 621 - DNA, 50 bp, Artificial Sequence
  Description of Artificial Sequence: Synthetic probe
acaaatctatacaaatataaactattaaacaatatttaaaacrctttaac

SEQ ID NO: 622 - DNA, 50 bp, Artificial Sequence
  Description of Artificial Sequence: Synthetic probe
ataacctaaaaaaatataatacataaaacaacaaaccctttcrctaaaac

SEQ ID NO: 623 - DNA, 50 bp, Artificial Sequence
  Description of Artificial Sequence: Synthetic probe
ataaaaatcatataaacataaaaaccatattatccatattacrtacctac

SEQ ID NO: 624 - DNA, 50 bp, Artificial Sequence
  Description of Artificial Sequence: Synthetic probe
atttttaaattcaactctaacaacaaaacttatacracatcttttactcc

SEQ ID NO: 625 - DNA, 50 bp, Artificial Sequence
  Description of Artificial Sequence: Synthetic probe
tataacaatttaaaaatttttaaattcaactctaacaacaaaacttatac

SEQ ID NO: 626 - DNA, 50 bp, Artificial Sequence
  Description of Artificial Sequence: Synthetic probe
aatcccaaacratcctttcttcttcaaaaaaatcttatattcatacatcc

SEQ ID NO: 627 - DNA, 50 bp, Artificial Sequence
  Description of Artificial Sequence: Synthetic probe
aactaccacttccatttatcatattttcacttctccaattcaattacaac

SEQ ID NO: 628 - DNA, 50 bp, Artificial Sequence
  Description of Artificial Sequence: Synthetic probe
ccccaaaaaaaactactaaaatttatttactaacttactacaccaacctc

SEQ ID NO: 629 - DNA, 50 bp, Artificial Sequence
  Description of Artificial Sequence: Synthetic probe
caaaaattacaataaaccraaatcrtaccatcacaacaaaacaaaactcc

SEQ ID NO: 630 - DNA, 50 bp, Artificial Sequence
  Description of Artificial Sequence: Synthetic probe
raattcaccccctacatacccrttaaaataacattaatcaatctatttac

SEQ ID NO: 631 - DNA, 50 bp, Artificial Sequence
  Description of Artificial Sequence: Synthetic probe
aatcataaaaatttcactcacrtaaataaactaattaataccactctaac

SEQ ID NO: 632 - DNA, 50 bp, Artificial Sequence
  Description of Artificial Sequence: Synthetic probe
ttactatatcctcacataacaaacraaacraattcaccccctacataccc

SEQ ID NO: 633 - DNA, 50 bp, Artificial Sequence
  Description of Artificial Sequence: Synthetic probe
rtaaataaactaattaataccactctaacraacatataaaaaataaattc

SEQ ID NO: 634 - DNA, 50 bp, Artificial Sequence
  Description of Artificial Sequence: Synthetic probe
taaactaattaataccactctaacraacatataaaaaataaattcrcccc

SEQ ID NO: 635 - DNA, 50 bp, Artificial Sequence
  Description of Artificial Sequence: Synthetic probe
acataatccaatatataacaataattaaaactattttctaaaaactaaac

SEQ ID NO: 636 - DNA, 50 bp, Artificial Sequence
  Description of Artificial Sequence: Synthetic probe
tttgtggtatgaattatggagtattgttttgagttgtttttataggtgat

SEQ ID NO: 637 - DNA, 50 bp, Artificial Sequence
  Description of Artificial Sequence: Synthetic probe
ttataatataaattataaaacattatcctaaattacccttataaataacc

SEQ ID NO: 638 - DNA, 50 bp, Artificial Sequence
  Description of Artificial Sequence: Synthetic probe
cactatccacrtttatttatccaaaaataatacaaaaaatctaaacattc

SEQ ID NO: 639 - DNA, 50 bp, Artificial Sequence
  Description of Artificial Sequence: Synthetic probe
aatctcactatattaaccaaaatacttttaatctccraaacttataattc

SEQ ID NO: 640 - DNA, 50 bp, Artificial Sequence
  Description of Artificial Sequence: Synthetic probe
aatcctacctattatttcttaaatcttcccacacccaatataactaaaac

SEQ ID NO: 641 - DNA, 50 bp, Artificial Sequence; identical to SEQ ID NO: 640
  Description of Artificial Sequence: Synthetic probe

SEQ ID NO: 642 - DNA, 50 bp, Artificial Sequence
  Description of Artificial Sequence: Synthetic probe
atcctacctattatttcttaaatcttcccacacccaatataactaaaaca

SEQ ID NO: 643 - DNA, 50 bp, Artificial Sequence
  Description of Artificial Sequence: Synthetic probe
agaaagttatttatataaggtgggaggttgtagtttatttatatttaggt

SEQ ID NO: 644 - DNA, 50 bp, Artificial Sequence
  Description of Artificial Sequence: Synthetic probe
aaaaattattcatataaaataaaaaactacaacccatttacacctaaacc

SEQ ID NO: 645 - DNA, 50 bp, Artificial Sequence
  Description of Artificial Sequence: Synthetic probe
aaaattattcatataaaataaaaaactacaacccatttacacctaaacca

SEQ ID NO: 646 - DNA, 50 bp, Artificial Sequence
  Description of Artificial Sequence: Synthetic probe
ttttcttttttaaaaatttcaaccaaatcttcaaacrttaatatatcttc

SEQ ID NO: 647 - DNA, 50 bp, Artificial Sequence
  Description of Artificial Sequence: Synthetic probe
aattaccttttaacttttcttttttaaaaatttcaaccaaatcttcaaac

SEQ ID NO: 648 - DNA, 50 bp, Artificial Sequence
  Description of Artificial Sequence: Synthetic probe
atctcaactattaaatcacaaactaaaaaaaacacatctcaaatatatcc

SEQ ID NO: 649 - DNA, 50 bp, Artificial Sequence
  Description of Artificial Sequence: Synthetic probe
ttttctactatctcctaaaacctacaacaacaatccrctttttttcaaac

SEQ ID NO: 650 - DNA, 50 bp, Artificial Sequence
  Description of Artificial Sequence: Synthetic probe
tcttcaacatacaaaaaacccaaatctccatcctttaaaaatctctaatc

SEQ ID NO: 651 - DNA, 50 bp, Artificial Sequence
  Description of Artificial Sequence: Synthetic probe
cttcaacatacaaaaaacccaaatctccatcctttaaaaatctctaatca

SEQ ID NO: 652 - DNA, 50 bp, Artificial Sequence
  Description of Artificial Sequence: Synthetic probe
accttccctaaaaaattataaatttaaaaaaatcttcctattataactac

SEQ ID NO: 653 - DNA, 50 bp, Artificial Sequence
  Description of Artificial Sequence: Synthetic probe
ccttccctaaaaaattataaatttaaaaaaatcttcctattataactaca

SEQ ID NO: 654 - DNA, 50 bp, Artificial Sequence
  Description of Artificial Sequence: Synthetic probe
ttctctaaactccatatacttcaattaaccctttcccaatacrattctcc

SEQ ID NO: 655 - DNA, 50 bp, Artificial Sequence
  Description of Artificial Sequence: Synthetic probe
tcttcraaaaacctattaccctcaacaatcccaaataaaaaaacccaatc

SEQ ID NO: 656 - DNA, 50 bp, Artificial Sequence
  Description of Artificial Sequence: Synthetic probe
gttttyggaaggtttgttgtttttaatagttttagataagaaggtttagt

SEQ ID NO: 657 - DNA, 50 bp, Artificial Sequence
  Description of Artificial Sequence: Synthetic probe
aatcaatatttattaaactctaaatctataatcacraacaaatcataaac

SEQ ID NO: 658 - DNA, 50 bp, Artificial Sequence
  Description of Artificial Sequence: Synthetic probe
ttaactaacctcatctcaactactcttaaaaaaacaaaaacctttacaac

SEQ ID NO: 659 - DNA, 50 bp, Artificial Sequence
  Description of Artificial Sequence: Synthetic probe
taattagtgtttgttgaattttagatttgtggttaygaataagttatgga

SEQ ID NO: 660 - DNA, 50 bp, Artificial Sequence
  Description of Artificial Sequence: Synthetic probe
aactaaaaaaaaactaactcttcaaaaaacratccccratctcaaacacc

SEQ ID NO: 661 - DNA, 50 bp, Artificial Sequence
  Description of Artificial Sequence: Synthetic probe
taaaaacctacraaatcctcaaaacaacrattaactccaaaaacraaaac

SEQ ID NO: 662 - DNA, 50 bp, Artificial Sequence
  Description of Artificial Sequence: Synthetic probe
aaccrttaaaaacccttttaaataacatcttataaatcctcratcttccc

SEQ ID NO: 663 - DNA, 50 bp, Artificial Sequence
  Description of Artificial Sequence: Synthetic probe
aaatactattaaaaccaaaatttttatattcrcaccaaaaccactacttc

SEQ ID NO: 664 - DNA, 50 bp, Artificial Sequence
  Description of Artificial Sequence: Synthetic probe
ctttaccaccatctaataaaaacraaacccrttaacrcrcrataacraac

SEQ ID NO: 665 - DNA, 50 bp, Artificial Sequence
  Description of Artificial Sequence: Synthetic probe
acrcaaaataaacccccractacaataataaataacrctatcttcaaaac

SEQ ID NO: 666 - DNA, 50 bp, Artificial Sequence
  Description of Artificial Sequence: Synthetic probe
gttttaattygggtatttttattggtataaggaaggtgggtagttagtat

SEQ ID NO: 667 - DNA, 50 bp, Artificial Sequence
  Description of Artificial Sequence: Synthetic probe
aaacaaaatttcactatattaaccaaactaatctccaactcctaactaca

SEQ ID NO: 668 - DNA, 50 bp, Artificial Sequence
  Description of Artificial Sequence: Synthetic probe
ttatatatatcaacaaatttctcctctaaatataccaaatatctaaatac

SEQ ID NO: 669 - DNA, 50 bp, Artificial Sequence
  Description of Artificial Sequence: Synthetic probe
accaatacctaacctctaaaactacaaacattacaaacaacatacccacc

SEQ ID NO: 670 - DNA, 50 bp, Artificial Sequence
  Description of Artificial Sequence: Synthetic probe
tttttttttttaccttcaaacatctatttaacaaaacacatcttacacca

SEQ ID NO: 671 - DNA, 50 bp, Artificial Sequence
  Description of Artificial Sequence: Synthetic probe
tatcatataaactcccaataaccctaaaaacaccaccatactaattaccc

SEQ ID NO: 672 - DNA, 50 bp, Artificial Sequence
  Description of Artificial Sequence: Synthetic probe
aacrcaaaaaaccataaacaataaaatataaatcaacatcraaactaaac

SEQ ID NO: 673 - DNA, 50 bp, Artificial Sequence
  Description of Artificial Sequence: Synthetic probe
atttcacaactcccaaaatttcraatttctccaaaataacctcttccatc

SEQ ID NO: 674 - DNA, 50 bp, Artificial Sequence
  Description of Artificial Sequence: Synthetic probe
caaacctaaactataaactaaaaaaacaatcaactaacctaaaataaccc

SEQ ID NO: 675 - DNA, 50 bp, Artificial Sequence
  Description of Artificial Sequence: Synthetic probe
tttgttaaaatttgatttgtgtttggattygatttagygggaagtttatt

SEQ ID NO: 676 - DNA, 50 bp, Artificial Sequence
  Description of Artificial Sequence: Synthetic probe
ttaccaaaatctaacttatatttaaattcratccaacraaaaatccaccc

SEQ ID NO: 677 - DNA, 50 bp, Artificial Sequence
  Description of Artificial Sequence: Synthetic probe
rtcacacracctaaacctccctaaataaaaaatatttactaaacaatccc

SEQ ID NO: 678 - DNA, 50 bp, Artificial Sequence
  Description of Artificial Sequence: Synthetic probe
ygttataygatttgggtttttttgaatgggagatatttattaggtaattt

SEQ ID NO: 679 - DNA, 50 bp, Artificial Sequence
  Description of Artificial Sequence: Synthetic probe
aaatttttctaacccatacctaaaaacatatcacctcacaatataacttc

SEQ ID NO: 680 - DNA, 50 bp, Artificial Sequence
  Description of Artificial Sequence: Synthetic probe
ccccctccccrtaaaaaatttaaactacaaaacracctaactaacaaacc

SEQ ID NO: 681 - DNA, 50 bp, Artificial Sequence
  Description of Artificial Sequence: Synthetic probe
aaaatacaaaaaccaaacaaatatattccatattcttaaaaatcaaaatc

SEQ ID NO: 682 - DNA, 50 bp, Artificial Sequence
  Description of Artificial Sequence: Synthetic probe
tctctccttcttaatacataaactaaaaataatcataatccttaattcac

SEQ ID NO: 683 - DNA, 50 bp, Artificial Sequence
  Description of Artificial Sequence: Synthetic probe
tactattcattttccttaatataaaatttctaaacactcaaaataacatc

SEQ ID NO: 684 - DNA, 50 bp, Artificial Sequence
  Description of Artificial Sequence: Synthetic probe
aaatctaatctttttattactacattcttaatatttcaaaaaccaaaaac

SEQ ID NO: 685 - DNA, 50 bp, Artificial Sequence
  Description of Artificial Sequence: Synthetic probe
attccttaatatctaatacttcaattattatatcaaatcaaactacattc

SEQ ID NO: 686 - DNA, 50 bp, Artificial Sequence
  Description of Artificial Sequence: Synthetic probe
aataaaaataaatccacaaacaacctcccttaataaaaaatctcaatcac

SEQ ID NO: 687 - DNA, 50 bp, Artificial Sequence
  Description of Artificial Sequence: Synthetic probe
ttagtaattatttaaatgtagggatttatggtaatagttgaagtggagaa

SEQ ID NO: 688 - DNA, 50 bp, Artificial Sequence
  Description of Artificial Sequence: Synthetic probe
aaaaatcttccattattttctataattaacaatttttaaataattatcac

SEQ ID NO: 689 - DNA, 50 bp, Artificial Sequence
  Description of Artificial Sequence: Synthetic probe
acacataaccaataaaattataaccaccccctaatacccctacaatatcc

SEQ ID NO: 690 - DNA, 50 bp, Artificial Sequence
  Description of Artificial Sequence: Synthetic probe
cacataaccaataaaattataaccaccccctaatacccctacaatatcca

SEQ ID NO: 691 - DNA, 50 bp, Artificial Sequence
  Description of Artificial Sequence: Synthetic probe
ttatagttgtggttattygtaaaggagattggtgtagatatattagagga

SEQ ID NO: 692 - DNA, 50 bp, Artificial Sequence
  Description of Artificial Sequence: Synthetic probe
aaaaactcracattatcaataacctttaataaaattttattcatccaaac

SEQ ID NO: 693 - DNA, 50 bp, Artificial Sequence
  Description of Artificial Sequence: Synthetic probe
ttatggtaatgattttaagtgtttgatattttgttattaatttagggaga

SEQ ID NO: 694 - DNA, 50 bp, Artificial Sequence
  Description of Artificial Sequence: Synthetic probe
tttctcctatcataatatatactctacttcacctaaaactttatataatc

SEQ ID NO: 695 - DNA, 50 bp, Artificial Sequence
  Description of Artificial Sequence: Synthetic probe
ataacaaaatatcaaacacttaaaatcattaccataatttcctataatac

SEQ ID NO: 696 - DNA, 50 bp, Artificial Sequence
  Description of Artificial Sequence: Synthetic probe
tatctcattttttcataatataaaaataaaacatatcctatttaactaac

SEQ ID NO: 697 - DNA, 50 bp, Artificial Sequence
  Description of Artificial Sequence: Synthetic probe
aaaaaaatcaaaaaattataaaatactcccaaatacttctaaactccccc

SEQ ID NO: 698 - DNA, 50 bp, Artificial Sequence
  Description of Artificial Sequence: Synthetic probe
acatataaaaacacctttataaactcacaactaaactcctattaaactac

SEQ ID NO: 699 - DNA, 50 bp, Artificial Sequence
  Description of Artificial Sequence: Synthetic probe
aaatgtaatattgaggaaaagatatgaaattattttttgtaaggtataag

SEQ ID NO: 700 - DNA, 50 bp, Artificial Sequence
  Description of Artificial Sequence: Synthetic probe
aatgtaatattgaggaaaagatatgaaattattttttgtaaggtataagt

SEQ ID NO: 701 - DNA, 50 bp, Artificial Sequence
  Description of Artificial Sequence: Synthetic probe
aggtttattagtgttttagygaaggatgaagaagaaatttaaaatattaa

SEQ ID NO: 702 - DNA, 50 bp, Artificial Sequence
  Description of Artificial Sequence: Synthetic probe
ggtttattagtgttttagtgaaggatgaagaagaaatttaaaatattaat

SEQ ID NO: 703 - DNA, 50 bp, Artificial Sequence
  Description of Artificial Sequence: Synthetic probe
atccctttctctaaaaatatctatattaatccccttacttataaaaaatc

SEQ ID NO: 704 - DNA, 50 bp, Artificial Sequence
  Description of Artificial Sequence: Synthetic probe
tccctttctctaaaaatatctatattaatccccttacttataaaaaatca

SEQ ID NO: 705 - DNA, 50 bp, Artificial Sequence
  Description of Artificial Sequence: Synthetic probe
tttcaaatattcaaaaaactatcaactccaaatttaatatccaataacac

SEQ ID NO: 706 - DNA, 50 bp, Artificial Sequence; identical to SEQ ID NO: 705
  Description of Artificial Sequence: Synthetic probe

SEQ ID NO: 707 - DNA, 50 bp, Artificial Sequence
  Description of Artificial Sequence: Synthetic probe
ttcaaatattcaaaaaactatcaactccaaatttaatatccaataacaca

SEQ ID NO: 708 - DNA, 50 bp, Artificial Sequence; identical to SEQ ID NO: 707
  Description of Artificial Sequence: Synthetic probe

SEQ ID NO: 709 - DNA, 50 bp, Artificial Sequence; identical to SEQ ID NO: 707
  Description of Artificial Sequence: Synthetic probe

SEQ ID NO: 710 - DNA, 50 bp, Artificial Sequence; identical to SEQ ID NO: 707
  Description of Artificial Sequence: Synthetic probe

SEQ ID NO: 711 - DNA, 50 bp, Artificial Sequence
  Description of Artificial Sequence: Synthetic probe
ttactttccaatacccaacttaattacataaaattatataaaaacaaacc

SEQ ID NO: 712 - DNA, 50 bp, Artificial Sequence
  Description of Artificial Sequence: Synthetic probe
tttactttcattctacccttccctatattcaacatttccttcaaaaattc

SEQ ID NO: 713 - DNA, 50 bp, Artificial Sequence
  Description of Artificial Sequence: Synthetic probe
ttactttcattctacccttccctatattcaacatttccttcaaaaattca

SEQ ID NO: 714 - DNA, 50 bp, Artificial Sequence
  Description of Artificial Sequence: Synthetic probe
aaatttcctttattcattatacattctctttatcatactaaataaaaatc

SEQ ID NO: 715 - DNA, 50 bp, Artificial Sequence
  Description of Artificial Sequence: Synthetic probe
gttatataattagaattttgaagtttatagtagggttggtattggtattt

SEQ ID NO: 716 - DNA, 50 bp, Artificial Sequence
  Description of Artificial Sequence: Synthetic probe
ttttattaaggtttaggatattaattaaattatgtttgtatatggagttt

SEQ ID NO: 717 - DNA, 50 bp, Artificial Sequence
  Description of Artificial Sequence: Synthetic probe
tttattaaggtttaggatattaattaaattatgtttgtatatggagtttt

SEQ ID NO: 718 - DNA, 50 bp, Artificial Sequence
  Description of Artificial Sequence: Synthetic probe
ttccctttctctaaaaatatctatatttacccctttacttataaaaaatc

SEQ ID NO: 719 - DNA, 50 bp, Artificial Sequence
  Description of Artificial Sequence: Synthetic probe
tccctttctctaaaaatatctatatttacccctttacttataaaaaatca

SEQ ID NO: 720 - DNA, 50 bp, Artificial Sequence
  Description of Artificial Sequence: Synthetic probe
acaacaaaactaaaaatttcctaaacatccrtattcttaaaaaaaaccac

SEQ ID NO: 721 - DNA, 50 bp, Artificial Sequence
  Description of Artificial Sequence: Synthetic probe
caacaaaactaaaaatttcctaaacatccatattcttaaaaaaaaccaca

SEQ ID NO: 722 - DNA, 50 bp, Artificial Sequence
  Description of Artificial Sequence: Synthetic probe
attacataattaaaaccctaaaattcataataaaactaacattaatactc

SEQ ID NO: 723 - DNA, 50 bp, Artificial Sequence
  Description of Artificial Sequence: Synthetic probe
ttacataattaaaaccctaaaattcataataaaactaacattaatactca

SEQ ID NO: 724 - DNA, 50 bp, Artificial Sequence
  Description of Artificial Sequence: Synthetic probe
ataataccacctcctttctactaaaaatatatataccacaatcaaaaatc

SEQ ID NO: 725 - DNA, 50 bp, Artificial Sequence
  Description of Artificial Sequence: Synthetic probe
taataccacctcctttctactaaaaatatatataccacaatcaaaaatca

SEQ ID NO: 726 - DNA, 50 bp, Artificial Sequence
  Description of Artificial Sequence: Synthetic probe
aaatagtaaagtaaaaattttttggaaattaaagggtaaagtataatgat

SEQ ID NO: 727 - DNA, 50 bp, Artificial Sequence
  Description of Artificial Sequence: Synthetic probe
aatagtaaagtaaaaattttttggaaattaaagggtaaagtataatgatt

SEQ ID NO: 728 - DNA, 50 bp, Artificial Sequence
  Description of Artificial Sequence: Synthetic probe
aaataaaatttcaccatataaaccaaaataatctcaatctcctaacctca

SEQ ID NO: 729 - DNA, 50 bp, Artificial Sequence
  Description of Artificial Sequence: Synthetic probe
ctaattaacctatttaccttcraaacraatccaaaacrttcaaacttccc

SEQ ID NO: 730 - DNA, 50 bp, Artificial Sequence
  Description of Artificial Sequence: Synthetic probe
ccrtaaacaaaaaaaaccccttcaaaaaactattccttattaaaaataac

SEQ ID NO: 731 - DNA, 50 bp, Artificial Sequence
  Description of Artificial Sequence: Synthetic probe
aaatactaaaattaaatcctacaatattcrtacaatcaaaatctcaaacc

SEQ ID NO: 732 - DNA, 50 bp, Artificial Sequence
  Description of Artificial Sequence: Synthetic probe
acctttttcttaaacttattaaatttcttctacaaaacctcctcttcctc

SEQ ID NO: 733 - DNA, 50 bp, Artificial Sequence
  Description of Artificial Sequence: Synthetic probe
tttgtttttgaattaggagttattatgttggtgatatttttyggattgag

SEQ ID NO: 734 - DNA, 50 bp, Artificial Sequence
  Description of Artificial Sequence: Synthetic probe
ctacccctaaactaaaaaccaccatattaataataccccccraactaaac

SEQ ID NO: 735 - DNA, 50 bp, Artificial Sequence
  Description of Artificial Sequence: Synthetic probe
aaaattcraaatccraactatctctcccraaaccttaaaactaataaaac

SEQ ID NO: 736 - DNA, 50 bp, Artificial Sequence
  Description of Artificial Sequence: Synthetic probe
craaccataacracracrataacraaaactactatctaaacaacrattac

SEQ ID NO: 737 - DNA, 50 bp, Artificial Sequence
  Description of Artificial Sequence: Synthetic probe
ctaaacccctctaattatccctaacctacctataaatatctaaaaatatc

SEQ ID NO: 738 - DNA, 50 bp, Artificial Sequence
  Description of Artificial Sequence: Synthetic probe
aaaactaacccttacccttacttaaaatccctactaaacctccccaaatc

SEQ ID NO: 739 - DNA, 50 bp, Artificial Sequence
  Description of Artificial Sequence: Synthetic probe
raaaacrcaaatacccaaaactaactaactactttaaaaccattaactac

SEQ ID NO: 740 - DNA, 50 bp, Artificial Sequence
  Description of Artificial Sequence: Synthetic probe
aaatcaactctcraaacaaaacaaatcccracaaaaccaaacccaatacc

SEQ ID NO: 741 - DNA, 50 bp, Artificial Sequence
  Description of Artificial Sequence: Synthetic probe
aatgttttaggagttggttatttatgttgtgaattgaggttgtttttagg

SEQ ID NO: 742 - DNA, 50 bp, Artificial Sequence
  Description of Artificial Sequence: Synthetic probe
atactttaaaaattaaccacccatattataaactaaaattattcccaaac

SEQ ID NO: 743 - DNA, 50 bp, Artificial Sequence
  Description of Artificial Sequence: Synthetic probe
ctcttccaaaaatatttaaactacctccaaaatcacaatatcttaaacca

SEQ ID NO: 744 - DNA, 50 bp, Artificial Sequence
  Description of Artificial Sequence: Synthetic probe
tataaacaccrcttctacraaaactacataacraccctactaaaataaac

SEQ ID NO: 745 - DNA, 50 bp, Artificial Sequence
  Description of Artificial Sequence: Synthetic probe
ccaaacaaaaaaactcctcacttcccaataaaaacaaccaaacaaaaaca

SEQ ID NO: 746 - DNA, 50 bp, Artificial Sequence; identical to SEQ ID NO: 745
  Description of Artificial Sequence: Synthetic probe

SEQ ID NO: 747 - DNA, 50 bp, Artificial Sequence
  Description of Artificial Sequence: Synthetic probe
taaaaaaaatttaaaacctaaaactctaaactacctaaatctttccaaac

SEQ ID NO: 748 - DNA, 50 bp, Artificial Sequence
  Description of Artificial Sequence: Synthetic probe
ctctccacraaacttaaaaaaaaactttcaacaaatcttcttaacttatc

SEQ ID NO: 749 - DNA, 50 bp, Artificial Sequence
  Description of Artificial Sequence: Synthetic probe
aaaataactaccaaacaaaaaaactcctcacttctcaaacaaaacaacca

SEQ ID NO: 750 - DNA, 50 bp, Artificial Sequence
  Description of Artificial Sequence: Synthetic probe
ccaacttccaatactactattaaaaaatcctcaactaaatattataatac

SEQ ID NO: 751 - DNA, 50 bp, Artificial Sequence
  Description of Artificial Sequence: Synthetic probe
tttagtttttagtgttattgttgaaaagtttttagttaggtgttatggtg

SEQ ID NO: 752 - DNA, 50 bp, Artificial Sequence
  Description of Artificial Sequence: Synthetic probe
caaacraaccataacraaataaaaccaaacracaaaaccactaaacrccc

SEQ ID NO: 753 - DNA, 50 bp, Artificial Sequence
  Description of Artificial Sequence: Synthetic probe
aaaaaatctcccatatctacttctttctacacaaacaaaacaaccatcca

SEQ ID NO: 754 - DNA, 50 bp, Artificial Sequence
  Description of Artificial Sequence: Synthetic probe
cttataacttctcttttatatttcttatctacactaattaaattaacccc

SEQ ID NO: 755 - DNA, 50 bp, Artificial Sequence
  Description of Artificial Sequence: Synthetic probe
aatctaaaatctaaacaaattccacaaccttaaaataaatctaaaaccca

SEQ ID NO: 756 - DNA, 50 bp, Artificial Sequence
  Description of Artificial Sequence: Synthetic probe
craccttaaaaaccccaacaatcracctttaaataatctcatttaactcc

SEQ ID NO: 757 - DNA, 50 bp, Artificial Sequence
  Description of Artificial Sequence: Synthetic probe
attatattcaatctttataaatcctctaaattccaactactcaacctccc

SEQ ID NO: 758 - DNA, 50 bp, Artificial Sequence
  Description of Artificial Sequence: Synthetic probe
aaacrttcacraaaataaatctcctccaaacattcaaaccctaaaaccac

SEQ ID NO: 759 - DNA, 50 bp, Artificial Sequence
  Description of Artificial Sequence: Synthetic probe
acttcaaaacctaccctattttacaatatattccatccttaaaaaatccc

SEQ ID NO: 760 - DNA, 50 bp, Artificial Sequence
  Description of Artificial Sequence: Synthetic probe
tttataaacaacaacacaatttacaccraaaattaaaaccctttctcacc

SEQ ID NO: 761 - DNA, 50 bp, Artificial Sequence
  Description of Artificial Sequence: Synthetic probe
ctcaatacaaaccctctaaaatacaaaccttccccaaataaaacaattcc

SEQ ID NO: 762 - DNA, 50 bp, Artificial Sequence
  Description of Artificial Sequence: Synthetic probe
ygtatattttgagatggttgtttagaaagttagtttatagaagtattttg

SEQ ID NO: 763 - DNA, 50 bp, Artificial Sequence
  Description of Artificial Sequence: Synthetic probe
atcccaaacrcctttacccaaattcattttcaatttaaaccaaaatcccc

SEQ ID NO: 764 - DNA, 50 bp, Artificial Sequence
  Description of Artificial Sequence: Synthetic probe
tcccaaacacctttacccaaattcattttcaatttaaaccaaaatcccca

SEQ ID NO: 765 - DNA, 50 bp, Artificial Sequence
  Description of Artificial Sequence: Synthetic probe
atcaacaacaaactcctatacatcccrataatcacrattctccatcttcc

SEQ ID NO: 766 - DNA, 50 bp, Artificial Sequence
  Description of Artificial Sequence: Synthetic probe
aaataaatcttcctacctatacaacttctaatactacctccttctacaac

SEQ ID NO: 767 - DNA, 50 bp, Artificial Sequence
  Description of Artificial Sequence: Synthetic probe
gtttggtttgatgatataagttagttgggattagataagtatgttyggga

SEQ ID NO: 768 - DNA, 50 bp, Artificial Sequence
  Description of Artificial Sequence: Synthetic probe
cctaatctaataacacaaatcaactaaaaccaaacaaacatacccraaac

SEQ ID NO: 769 - DNA, 50 bp, Artificial Sequence
  Description of Artificial Sequence: Synthetic probe
aataaaactaaataaatacctaacctaaaactcatttccactccatcacc

SEQ ID NO: 770 - DNA, 50 bp, Artificial Sequence
  Description of Artificial Sequence: Synthetic probe
atggtttttatttaatgatagtgatttgtttattatggagatgttgattg

SEQ ID NO: 771 - DNA, 50 bp, Artificial Sequence
  Description of Artificial Sequence: Synthetic probe
accraaaaaacraatccaatcrcaacaaactactaaaacrcacaatctcc

SEQ ID NO: 772 - DNA, 50 bp, Artificial Sequence
  Description of Artificial Sequence: Synthetic probe
atttctctcacaaactatatacaataccctaaacctaaaaaatacctacc

SEQ ID NO: 773 - DNA, 50 bp, Artificial Sequence
  Description of Artificial Sequence: Synthetic probe
tttcrcrctaaaaaaaaccctttaaaacttataactccactccraaaaac

SEQ ID NO: 774 - DNA, 50 bp, Artificial Sequence
  Description of Artificial Sequence: Synthetic probe
tgtgtaaatggttygagtatatattttaagtgagaattatttgaagattt

SEQ ID NO: 775 - DNA, 50 bp, Artificial Sequence
  Description of Artificial Sequence: Synthetic probe
atataaataacccraacacacattttaaataaaaaccatttaaaaactcc

SEQ ID NO: 776 - DNA, 50 bp, Artificial Sequence
  Description of Artificial Sequence: Synthetic probe
tggtagagtaataaaatataaatagttttaattttggttttggaggaygg

SEQ ID NO: 777 - DNA, 50 bp, Artificial Sequence
  Description of Artificial Sequence: Synthetic probe
aataaaacaacaaaatataaacaaccccaatcttaaccctaaaaaacrac

SEQ ID NO: 778 - DNA, 50 bp, Artificial Sequence
  Description of Artificial Sequence: Synthetic probe
ctctaacactcactatttctaaaatttaattaacrcaataaaaaacccrc

SEQ ID NO: 779 - DNA, 50 bp, Artificial Sequence
  Description of Artificial Sequence: Synthetic probe
ccctccctaccaaatactaacctaatattctaatttaaaaaaaccctctc

SEQ ID NO: 780 - DNA, 50 bp, Artificial Sequence
  Description of Artificial Sequence: Synthetic probe
caaaaaacacaaactaacaaaaatccattctttcccacrattactaacac

SEQ ID NO: 781 - DNA, 50 bp, Artificial Sequence
  Description of Artificial Sequence: Synthetic probe
ggttaggagatttttaagtatatgaatttgtgttgttatatagtagtatt

SEQ ID NO: 782 - DNA, 50 bp, Artificial Sequence
  Description of Artificial Sequence: Synthetic probe
accaaaaaaccctcaaacacataaacttatactatcacacaacaacatcc

SEQ ID NO: 783 - DNA, 50 bp, Artificial Sequence
  Description of Artificial Sequence: Synthetic probe
atatttacctaataccccaccatcaacaaatactttaatcaataatatcc

SEQ ID NO: 784 - DNA, 50 bp, Artificial Sequence
  Description of Artificial Sequence: Synthetic probe
ccracatcractaatcaaaaccaaactcrataaaactttatctccctacc

SEQ ID NO: 785 - DNA, 50 bp, Artificial Sequence
  Description of Artificial Sequence: Synthetic probe
ttaatctaaattctaatttaacaaatcaaaaaacttaacaactacccrac

SEQ ID NO: 786 - DNA, 50 bp, Artificial Sequence
  Description of Artificial Sequence: Synthetic probe
tataaccaattcctatcrcaaataaactttaaactactactaacccacrc

SEQ ID NO: 787 - DNA, 50 bp, Artificial Sequence
  Description of Artificial Sequence: Synthetic probe
attgttgttattttttgagtatttattgtgaggttagtattaggattatt

SEQ ID NO: 788 - DNA, 50 bp, Artificial Sequence
  Description of Artificial Sequence: Synthetic probe
ttactaccatttcttaaacactcactataaaactaacaccaaaaccatcc

SEQ ID NO: 789 - DNA, 50 bp, Artificial Sequence
  Description of Artificial Sequence: Synthetic probe
aaactaaaaaaaatactaacratatatataaataacactaccccctcrtc

SEQ ID NO: 790 - DNA, 50 bp, Artificial Sequence
  Description of Artificial Sequence: Synthetic probe
cccacctaatacaaaaatatatctccatcacaactccacaaatatatttc

SEQ ID NO: 791 - DNA, 50 bp, Artificial Sequence
  Description of Artificial Sequence: Synthetic probe
cactcatattaacrccataaacacacaacatacaaccaaacactacaacc

SEQ ID NO: 792 - DNA, 50 bp, Artificial Sequence
  Description of Artificial Sequence: Synthetic probe
taaccctaaattccraacctcaattttcactaaataaacratcrctaaac

SEQ ID NO: 793 - DNA, 50 bp, Artificial Sequence
  Description of Artificial Sequence: Synthetic probe
aaaaaaaaaatataacrtacaaataaaatacccrccrctataacrctacc

SEQ ID NO: 794 - DNA, 50 bp, Artificial Sequence
  Description of Artificial Sequence: Synthetic probe
ataaaaaacrattcctccccrcttaaacccttcraatacaaatctaaccc

SEQ ID NO: 795 - DNA, 50 bp, Artificial Sequence
  Description of Artificial Sequence: Synthetic probe
tgtgaattaattagagtttagagttaggatttttagagtatttttggggt

SEQ ID NO: 796 - DNA, 50 bp, Artificial Sequence
  Description of Artificial Sequence: Synthetic probe
ataaatcaaccaaaacccaaaatcaaaatctccaaaacatctctaaaacc

SEQ ID NO: 797 - DNA, 50 bp, Artificial Sequence
  Description of Artificial Sequence: Synthetic probe
aacataacaacaaacctaaatctccataaaccaaataaaaaatatcattc

SEQ ID NO: 798 - DNA, 50 bp, Artificial Sequence
  Description of Artificial Sequence: Synthetic probe
gggtatgatagtagatttgagtttttatgaattaggtgaaaggtgttatt

SEQ ID NO: 799 - DNA, 50 bp, Artificial Sequence
  Description of Artificial Sequence: Synthetic probe
acaaacaaacccaatcatttactaacatccctccactaaactaaatactc

SEQ ID NO: 800 - DNA, 50 bp, Artificial Sequence
  Description of Artificial Sequence: Synthetic probe
ccctccactaaactaaatactcrtccttttcactcacccaaaaactaaac

SEQ ID NO: 801 - DNA, 50 bp, Artificial Sequence
  Description of Artificial Sequence: Synthetic probe
cacccaccaaactctattaaacttatacctttaccratctataatcctac

SEQ ID NO: 802 - DNA, 50 bp, Artificial Sequence
  Description of Artificial Sequence: Synthetic probe
tagtttgaggagagatatatatagatttattttgtagtttatgagayggt

SEQ ID NO: 803 - DNA, 50 bp, Artificial Sequence
  Description of Artificial Sequence: Synthetic probe
ttatttattaagttttgttgaatttgtgtttttgtyggtttgtggttttg

SEQ ID NO: 804 - DNA, 50 bp, Artificial Sequence
  Description of Artificial Sequence: Synthetic probe
accctatcctctcacaacaaaataactaaaaaacaatacaaattctctcc

SEQ ID NO: 805 - DNA, 50 bp, Artificial Sequence
  Description of Artificial Sequence: Synthetic probe
caaatcracaatactaaataaatattacctctaacactacccrctacaac

SEQ ID NO: 806 - DNA, 50 bp, Artificial Sequence
  Description of Artificial Sequence: Synthetic probe
ttaaatyggtagtgttaaatggatgttgtttttgatattgttygttgtaa

SEQ ID NO: 807 - DNA, 50 bp, Artificial Sequence
  Description of Artificial Sequence: Synthetic probe
taacatatccttaatttcacttccctcactctcaataaaaccrttacaac

SEQ ID NO: 808 - DNA, 50 bp, Artificial Sequence
  Description of Artificial Sequence: Synthetic probe
ctaaaaatcaaatcracaatactaaataaatattacctctaacactaccc

SEQ ID NO: 809 - DNA, 50 bp, Artificial Sequence
  Description of Artificial Sequence: Synthetic probe
aaaaccrttacaacraacaatatcaaaaacaacatccatttaacactacc

SEQ ID NO: 810 - DNA, 50 bp, Artificial Sequence
  Description of Artificial Sequence: Synthetic probe
aaattttcttactaataaatcaaaataacatcrtaaaataattattcacc

SEQ ID NO: 811 - DNA, 50 bp, Artificial Sequence
  Description of Artificial Sequence: Synthetic probe
ccctccataaaaaaacctttcttccataactcaaaacacactcctaaatc

SEQ ID NO: 812 - DNA, 50 bp, Artificial Sequence
  Description of Artificial Sequence: Synthetic probe
cttcaaatccacatcctccaaatcctccaaatacctaaccaacttacaac

SEQ ID NO: 813 - DNA, 50 bp, Artificial Sequence
  Description of Artificial Sequence: Synthetic probe
craaacctaaaaaccctaaaaacaactacaaataaaaataacaaacaccc

SEQ ID NO: 814 - DNA, 50 bp, Artificial Sequence
  Description of Artificial Sequence: Synthetic probe
tcattaacrtaactaaatccacataatctaccttctctatctaacccctc

SEQ ID NO: 815 - DNA, 50 bp, Artificial Sequence
  Description of Artificial Sequence: Synthetic probe
cccattctatcacccaaaaaaaacataaaaactctaaaatcactaataac

SEQ ID NO: 816 - DNA, 50 bp, Artificial Sequence
  Description of Artificial Sequence: Synthetic probe
gygttatttttggttttatggaatagaagtatttgtgtttttaggaatta

SEQ ID NO: 817 - DNA, 50 bp, Artificial Sequence
  Description of Artificial Sequence: Synthetic probe
ataaacttaatttaactcaaaaataatacatcaaaactcttaattccatc

SEQ ID NO: 818 - DNA, 50 bp, Artificial Sequence
  Description of Artificial Sequence: Synthetic probe
cacaacaaaaaaccttttaaaacataaaaccccaaaaatacatcaatctc

SEQ ID NO: 819 - DNA, 50 bp, Artificial Sequence
  Description of Artificial Sequence: Synthetic probe
ctaaactcaaacratcctcccacctctccaacrtaattaaaaactacaac

SEQ ID NO: 820 - DNA, 50 bp, Artificial Sequence
  Description of Artificial Sequence: Synthetic probe
ctaaaactataacaaaaacacracraaacccttaacaattaccacctccc

SEQ ID NO: 821 - DNA, 50 bp, Artificial Sequence
  Description of Artificial Sequence: Synthetic probe
gttataggagatataaatgatgttttagtagatgttttgttgtatgagtt

SEQ ID NO: 822 - DNA, 50 bp, Artificial Sequence
  Description of Artificial Sequence: Synthetic probe
tcacaaaaaacacaaataatatctcaacaaatactttactatataaatcc

SEQ ID NO: 823 - DNA, 50 bp, Artificial Sequence
  Description of Artificial Sequence: Synthetic probe
aatacccaactattccccaacattatacaactactttaactcaatacctc

SEQ ID NO: 824 - DNA, 50 bp, Artificial Sequence
  Description of Artificial Sequence: Synthetic probe
ataataaaacraaaccaccaatatctacttaaaacaaactccctaactac

SEQ ID NO: 825 - DNA, 50 bp, Artificial Sequence
  Description of Artificial Sequence: Synthetic probe
taaacataatcatatcacaattttaatcaaaaatcactaaaaattcattc

SEQ ID NO: 826 - DNA, 50 bp, Artificial Sequence
  Description of Artificial Sequence: Synthetic probe
atatagggtgtttgaatttaggtttaggaggtttatygtggtagttatta

SEQ ID NO: 827 - DNA, 50 bp, Artificial Sequence
  Description of Artificial Sequence: Synthetic probe
cacaaaatacctaaactcaaatttaaaaaattcatcrtaacaatcatcac

SEQ ID NO: 828 - DNA, 50 bp, Artificial Sequence
  Description of Artificial Sequence: Synthetic probe
tataaattattccctcacctaaccaaatccaaaatacattaatttaaaac

SEQ ID NO: 829 - DNA, 50 bp, Artificial Sequence
  Description of Artificial Sequence: Synthetic probe
ataatactcttaaaattacttttaaaatacaaatataaaatcaatcccac

SEQ ID NO: 830 - DNA, 50 bp, Artificial Sequence
  Description of Artificial Sequence: Synthetic probe
agtgyggttttttagagattaaaaatagaggttggagaaatgatttttgt

SEQ ID NO: 831 - DNA, 50 bp, Artificial Sequence
  Description of Artificial Sequence: Synthetic probe
atacctaaaaacaaaacractaaaaaaactccattatctatactcttccc

SEQ ID NO: 832 - DNA, 50 bp, Artificial Sequence
  Description of Artificial Sequence: Synthetic probe
tttttgaggtggataatygattttaggaggagttagatttagatttattt

SEQ ID NO: 833 - DNA, 50 bp, Artificial Sequence
  Description of Artificial Sequence: Synthetic probe
taaaacaacccraactctaaaatcccccaaattaccccctaaattataac

SEQ ID NO: 834 - DNA, 50 bp, Artificial Sequence
  Description of Artificial Sequence: Synthetic probe
atacraaaaaaactcraaacctaaaataatttcacaactcccaaaatttc

SEQ ID NO: 835 - DNA, 50 bp, Artificial Sequence
  Description of Artificial Sequence: Synthetic probe
cacctactcctaaattatcaaaataactatcccatcatacacaactaatc

SEQ ID NO: 836 - DNA, 50 bp, Artificial Sequence
  Description of Artificial Sequence: Synthetic probe
gtatttgtttttaggttgttagagtgattgttttattatgtatagttgat

SEQ ID NO: 837 - DNA, 50 bp, Artificial Sequence
  Description of Artificial Sequence: Synthetic probe
ctctaaaaaaataatccattaacaaaacaaaatctaccaataaacttatc

SEQ ID NO: 838 - DNA, 50 bp, Artificial Sequence
  Description of Artificial Sequence: Synthetic probe
gttttagggaaataatttattgataaagtagggtttattaatgggtttgt

SEQ ID NO: 839 - DNA, 50 bp, Artificial Sequence
  Description of Artificial Sequence: Synthetic probe
aaaacratacattaaaaaaatcctaaacctaaaaaacaaatcccccraac

SEQ ID NO: 840 - DNA, 50 bp, Artificial Sequence
  Description of Artificial Sequence: Synthetic probe
cacacacacacaccccccctatacatcaaaaaaacaattacttaaactac

SEQ ID NO: 841 - DNA, 50 bp, Artificial Sequence
  Description of Artificial Sequence: Synthetic probe
cracaaatcttttacaaccttttcccccraaatcctaaaataaaaattac

SEQ ID NO: 842 - DNA, 50 bp, Artificial Sequence
  Description of Artificial Sequence: Synthetic probe
tttaacccacatcaaccttaatctaaatataccactttacttaaaaattc

SEQ ID NO: 843 - DNA, 50 bp, Artificial Sequence
  Description of Artificial Sequence: Synthetic probe
catttattaacattttcataacttactaaaccaaaaactccaaatcccac

SEQ ID NO: 844 - DNA, 50 bp, Artificial Sequence
  Description of Artificial Sequence: Synthetic probe
acraaacaactctaaacracracttctactttcaatttcrtacaaaacrc

SEQ ID NO: 845 - DNA, 50 bp, Artificial Sequence
  Description of Artificial Sequence: Synthetic probe
acrataaccaaacaaacacccrctcatatttaatacataaacctaaattc

SEQ ID NO: 846 - DNA, 50 bp, Artificial Sequence
  Description of Artificial Sequence: Synthetic probe
craaaaaacttaaatacaattctcaactttacacaaccaaaacttccccc

SEQ ID NO: 847 - DNA, 50 bp, Artificial Sequence
  Description of Artificial Sequence: Synthetic probe
gyggagtatattttgtgtatatgttgtttttattgttatttatgaagayg

SEQ ID NO: 848 - DNA, 50 bp, Artificial Sequence
  Description of Artificial Sequence: Synthetic probe
tccatcaaactcccatctcatctcctttctatctataaaactatctacrc

SEQ ID NO: 849 - DNA, 50 bp, Artificial Sequence
  Description of Artificial Sequence: Synthetic probe
ctaatacccttaaatccctcctctttatacaaataacctccrcatactcc

SEQ ID NO: 850 - DNA, 50 bp, Artificial Sequence
  Description of Artificial Sequence: Synthetic probe
rccttttcaataacctaaatcrctacaaataaaaaaacrccccrctaacc

SEQ ID NO: 851 - DNA, 50 bp, Artificial Sequence
  Description of Artificial Sequence: Synthetic probe
ctctctaaaacatatactatatccactcaaaattaaataaattaaaaaca

SEQ ID NO: 852 - DNA, 50 bp, Artificial Sequence
  Description of Artificial Sequence: Synthetic probe
tttgataaatttgttattgggtaatttttagtttaagtattgataatggg

SEQ ID NO: 853 - DNA, 50 bp, Artificial Sequence
  Description of Artificial Sequence: Synthetic probe
tcataaaattatttatctccaaaacttatttatattaaaccctaatctcc

SEQ ID NO: 854 - DNA, 50 bp, Artificial Sequence
  Description of Artificial Sequence: Synthetic probe
ataataaacaaccaaacaaaaacactcctcacttcctaaacaaaataaca

SEQ ID NO: 855 - DNA, 50 bp, Artificial Sequence
  Description of Artificial Sequence: Synthetic probe
aggttggagggttttatttagtttattaaagattagtaggatttggttag

SEQ ID NO: 856 - DNA, 50 bp, Artificial Sequence
  Description of Artificial Sequence: Synthetic probe
aactaaaaaacctcatctaacccatcaaaaatcaacaaaacttaatcaac

SEQ ID NO: 857 - DNA, 50 bp, Artificial Sequence
  Description of Artificial Sequence: Synthetic probe
ttgagttttgaatyggattaygatattgttttttagtatttggagaagaa

SEQ ID NO: 858 - DNA, 50 bp, Artificial Sequence
  Description of Artificial Sequence: Synthetic probe
accctaaaacctccraaaaatataaccctaacrtcaacctaaaaaactcc

SEQ ID NO: 859 - DNA, 50 bp, Artificial Sequence
  Description of Artificial Sequence: Synthetic probe
aaaaaacraaaaaattctttcrcccccrtaacraaaaacccctaaaaaac

SEQ ID NO: 860 - DNA, 50 bp, Artificial Sequence
  Description of Artificial Sequence: Synthetic probe
ccaaaaattttctaaaaactaaaatcctaccraccaaaaatcrtcaaacc

SEQ ID NO: 861 - DNA, 50 bp, Artificial Sequence
  Description of Artificial Sequence: Synthetic probe
actaccaaaataataataaacaaaaaaaacccatacttttcacccaaccc

SEQ ID NO: 862 - DNA, 50 bp, Artificial Sequence
  Description of Artificial Sequence: Synthetic probe
ttctccttctcctctcaattcctctctctaaaaaacrttctaaaaaaccc

SEQ ID NO: 863 - DNA, 50 bp, Artificial Sequence
  Description of Artificial Sequence: Synthetic probe
ccattaaacrcrtaacattcctaccrtccctaaaaaaaataattctctac

SEQ ID NO: 864 - DNA, 50 bp, Artificial Sequence
  Description of Artificial Sequence: Synthetic probe
cctcatttttaacctcttctaaccaataatcaaaccctctaacccactac

SEQ ID NO: 865 - DNA, 50 bp, Artificial Sequence
  Description of Artificial Sequence: Synthetic probe
accaacttcttcctaataatacttttatatacttatctaattaaaacttc

SEQ ID NO: 866 - DNA, 50 bp, Artificial Sequence
  Description of Artificial Sequence: Synthetic probe
aaaccraaaacaaaaacaataaccccaatatctcactaataccaaaaaac

SEQ ID NO: 867 - DNA, 50 bp, Artificial Sequence
  Description of Artificial Sequence: Synthetic probe
craaaaaattctttcrcccccrtaacraaaaacccctaaaaaacraatac

SEQ ID NO: 868 - DNA, 50 bp, Artificial Sequence
  Description of Artificial Sequence: Synthetic probe
aacaattcaaataaccctctacccacttctaacaaaaccrataaaccaac

SEQ ID NO: 869 - DNA, 50 bp, Artificial Sequence
  Description of Artificial Sequence: Synthetic probe
gtttggatattggattttgggatagagtagttagttgtttatgtattgtt

SEQ ID NO: 870 - DNA, 50 bp, Artificial Sequence
  Description of Artificial Sequence: Synthetic probe
cttaaatattaaaccctaaaacaaaacaaccaattattcatatactaccc

SEQ ID NO: 871 - DNA, 50 bp, Artificial Sequence
  Description of Artificial Sequence: Synthetic probe
aaataaattctcraatatttaactaaaatacaaattataaaaaactccac

SEQ ID NO: 872 - DNA, 50 bp, Artificial Sequence
  Description of Artificial Sequence: Synthetic probe
ctataaccctcctacccaacataactcaactctatatacaaataatactc

SEQ ID NO: 873 - DNA, 50 bp, Artificial Sequence
  Description of Artificial Sequence: Synthetic probe
cttcctcaaatattaaccctactaaaaccctaacctaattttcaactctc

SEQ ID NO: 874 - DNA, 50 bp, Artificial Sequence
  Description of Artificial Sequence: Synthetic probe
cccaaccaataccaacatactcaacrtaaccrataaataaacaaaaatac

SEQ ID NO: 875 - DNA, 50 bp, Artificial Sequence
  Description of Artificial Sequence: Synthetic probe
aaacraaacrctatttcracactacaaataaaatataaaaattactcatc

SEQ ID NO: 876 - DNA, 50 bp, Artificial Sequence
  Description of Artificial Sequence: Synthetic probe
aaactcaaaaaatcctatatttaaaaaaaataacratccaattaaaaccc

SEQ ID NO: 877 - DNA, 50 bp, Artificial Sequence
  Description of Artificial Sequence: Synthetic probe
caaaacaattaaaaaaattaaactatcatacratactacctacaataacc

SEQ ID NO: 878 - DNA, 50 bp, Artificial Sequence
  Description of Artificial Sequence: Synthetic probe
tcacaacccaaaaataacaaataaaccrcaatttccctcaaaaccatcac

SEQ ID NO: 879 - DNA, 50 bp, Artificial Sequence
  Description of Artificial Sequence: Synthetic probe
caaatttatatccataaaccctaaaccaacataaacctcaaactataccc

SEQ ID NO: 880 - DNA, 50 bp, Artificial Sequence
  Description of Artificial Sequence: Synthetic probe
aaataaaatcacrccattacataataaaatattccttactataaaataac

SEQ ID NO: 881 - DNA, 50 bp, Artificial Sequence
  Description of Artificial Sequence: Synthetic probe
tagatgagattaygttattgtataataaggtgttttttattgtggggtag

SEQ ID NO: 882 - DNA, 50 bp, Artificial Sequence
  Description of Artificial Sequence: Synthetic probe
ccatcaacctactctcctcaaaatcaacctataatcaaaactaaaatccc

SEQ ID NO: 883 - DNA, 50 bp, Artificial Sequence
  Description of Artificial Sequence: Synthetic probe
acatttccaaaaaataactccraaacccrcaaaaaaaaccttctaaaaac

SEQ ID NO: 884 - DNA, 50 bp, Artificial Sequence
  Description of Artificial Sequence: Synthetic probe
tatatttttaagagatggtttygaggttygtaagaaagattttttgagga

SEQ ID NO: 885 - DNA, 50 bp, Artificial Sequence
  Description of Artificial Sequence: Synthetic probe
taaacctcttactaattttacrtcctcaaaaaatctttcttacraacctc

SEQ ID NO: 886 - DNA, 50 bp, Artificial Sequence
  Description of Artificial Sequence: Synthetic probe
aataatttaaaatatcctaccaaccccaaactattctttccacraaatac

SEQ ID NO: 887 - DNA, 50 bp, Artificial Sequence
  Description of Artificial Sequence: Synthetic probe
ataaacaaataatttaaaatatcctaccaaccccaaactattctttccac

SEQ ID NO: 888 - DNA, 50 bp, Artificial Sequence
  Description of Artificial Sequence: Synthetic probe
tccaaaactccatacccttacccctatcccttactaattaaaattaatac

SEQ ID NO: 889 - DNA, 50 bp, Artificial Sequence
  Description of Artificial Sequence: Synthetic probe
cccaattttaaacacttatataacaaactaatattccccattacctctcc

SEQ ID NO: 890 - DNA, 50 bp, Artificial Sequence
  Description of Artificial Sequence: Synthetic probe
tttatcaacattctaaaatactatatattaaaataacttctctaaacccc

SEQ ID NO: 891 - DNA, 50 bp, Artificial Sequence
  Description of Artificial Sequence: Synthetic probe
ttaaataatacctactatacatcaaataatatccatacttaatctataac

SEQ ID NO: 892 - DNA, 50 bp, Artificial Sequence
  Description of Artificial Sequence: Synthetic probe
aagtttagtggatattatattttgagattttatatagatgttaagaaagg

SEQ ID NO: 893 - DNA, 50 bp, Artificial Sequence
  Description of Artificial Sequence: Synthetic probe
aatttaataaacactatatcctaaaatttcacacaaataccaaaaaaaac

SEQ ID NO: 894 - DNA, 50 bp, Artificial Sequence
  Description of Artificial Sequence: Synthetic probe
ctcaaaatataatatccactaaacttcaatacactacctaataaaacaac

SEQ ID NO: 895 - DNA, 50 bp, Artificial Sequence
  Description of Artificial Sequence: Synthetic probe
ttttacctactaaaacccrtttaaactcaaaaaatccrcacttaaaattc

SEQ ID NO: 896 - DNA, 50 bp, Artificial Sequence
  Description of Artificial Sequence: Synthetic probe
actacctaataaaacaacraactccaaatacraaccttttaaatttaaac

SEQ ID NO: 897 - DNA, 50 bp, Artificial Sequence
  Description of Artificial Sequence: Synthetic probe
aatacraataacrtaaaaaaaaccraccrctaaaaaacttttaaaaacrc

SEQ ID NO: 898 - DNA, 50 bp, Artificial Sequence
  Description of Artificial Sequence: Synthetic probe
aaaaaaaccrctaactcctaaaaaatccccctcctccaaattattcttcc

SEQ ID NO: 899 - DNA, 50 bp, Artificial Sequence
  Description of Artificial Sequence: Synthetic probe
atcatatattaaataaaataatcatatttatatactatcctttccaatac

SEQ ID NO: 900 - DNA, 50 bp, Artificial Sequence
  Description of Artificial Sequence: Synthetic probe
ctttaacrtactatcataccataaacattccttaaaaatatatttaaacc

SEQ ID NO: 901 - DNA, 50 bp, Artificial Sequence
  Description of Artificial Sequence: Synthetic probe
taaaacataaaaaaacaaatattaaatcactaaatacccaactctttaac

SEQ ID NO: 902 - DNA, 50 bp, Artificial Sequence
  Description of Artificial Sequence: Synthetic probe
ttttctatactaatattctctaaaaaatttcatctaaactacaattattc

SEQ ID NO: 903 - DNA, 50 bp, Artificial Sequence
  Description of Artificial Sequence: Synthetic probe
tctaaaatcraaaaccrtcttttaaaaaatcaatccctccttaattaccc

SEQ ID NO: 904 - DNA, 50 bp, Artificial Sequence
  Description of Artificial Sequence: Synthetic probe
acacatataaacattaatcaacactaaaatatttaataatcattattttc

SEQ ID NO: 905 - DNA, 50 bp, Artificial Sequence
  Description of Artificial Sequence: Synthetic probe
taatatatactctacaaatattcattaaaaaacaataaattttacraccc

SEQ ID NO: 906 - DNA, 50 bp, Artificial Sequence
  Description of Artificial Sequence: Synthetic probe
taaatgggatttataygtagaatgggataggggatttagtatttggtggt

SEQ ID NO: 907 - DNA, 50 bp, Artificial Sequence
  Description of Artificial Sequence: Synthetic probe
tagaagattaagtagaagtaatgtggtttatagttatgtttttgaggagt

SEQ ID NO: 908 - DNA, 50 bp, Artificial Sequence
  Description of Artificial Sequence: Synthetic probe
aaacccracctaaaaaaatattcttaaaacrccttaaacaaaaaaacaac

SEQ ID NO: 909 - DNA, 50 bp, Artificial Sequence
  Description of Artificial Sequence: Synthetic probe
aaaccaactaaactccaaataataataacccaacccatattatataaaac

SEQ ID NO: 910 - DNA, 50 bp, Artificial Sequence
  Description of Artificial Sequence: Synthetic probe
ttaaatacccaccraattccraaatcacraatctccaaaactatcccttc

SEQ ID NO: 911 - DNA, 50 bp, Artificial Sequence
  Description of Artificial Sequence: Synthetic probe
tttgaatgtttatygggtttyggaattaygagtttttagagttgtttttt

SEQ ID NO: 912 - DNA, 50 bp, Artificial Sequence
  Description of Artificial Sequence: Synthetic probe
aaaactacaaaatttcccaacaatcaacaattcttaaacttttaaatttc

SEQ ID NO: 913 - DNA, 50 bp, Artificial Sequence
  Description of Artificial Sequence: Synthetic probe
aacaactcctaaaaaaacacrtacacataactacaataaacctcctaatc

SEQ ID NO: 914 - DNA, 50 bp, Artificial Sequence
  Description of Artificial Sequence: Synthetic probe
tccttcacaaacacaatccaatcaaaatttcccaaacacatcratacacc

SEQ ID NO: 915 - DNA, 50 bp, Artificial Sequence
  Description of Artificial Sequence: Synthetic probe
actttaaaaacaaccaaaacccraaaattaccttatttctcraaaaaaac

SEQ ID NO: 916 - DNA, 50 bp, Artificial Sequence
  Description of Artificial Sequence: Synthetic probe
aaatcaaatcacracttcacaccaatcrttctaatcacttaaacrttcrc

SEQ ID NO: 917 - DNA, 50 bp, Artificial Sequence
  Description of Artificial Sequence: Synthetic probe
tccacctcaaattcccaattctcacaatataacaaccacactaaattatc

SEQ ID NO: 918 - DNA, 50 bp, Artificial Sequence
  Description of Artificial Sequence: Synthetic probe
ctaaattaaataattttcttaacaaaaaacaaatactttttctccatccc

SEQ ID NO: 919 - DNA, 50 bp, Artificial Sequence
  Description of Artificial Sequence: Synthetic probe
attatatagttatatagataatyggagggtaygtttttataggtgaagtt

SEQ ID NO: 920 - DNA, 50 bp, Artificial Sequence
  Description of Artificial Sequence: Synthetic probe
tcatacaatcatacaaataatcraaaaacacrttcccataaataaaaccc

SEQ ID NO: 921 - DNA, 50 bp, Artificial Sequence
  Description of Artificial Sequence: Synthetic probe
acccaacaactcattaaaaacaaaccataataataataacaattttatca

SEQ ID NO: 922 - DNA, 50 bp, Artificial Sequence
  Description of Artificial Sequence: Synthetic probe
aaacacataacaattcaaaaaatttaactttccattctctactaaataac

SEQ ID NO: 923 - DNA, 50 bp, Artificial Sequence
  Description of Artificial Sequence: Synthetic probe
tatcttttcccratattcctcaaatactccaaaaattcaaatttactcac

SEQ ID NO: 924 - DNA, 50 bp, Artificial Sequence
  Description of Artificial Sequence: Synthetic probe
ccaatattcacaacacactatttttatcactccrtttataaaaaaaacac

SEQ ID NO: 925 - DNA, 50 bp, Artificial Sequence
  Description of Artificial Sequence: Synthetic probe
aaaccracaatacctaaattactacaacaaatatccttaacrattcaaac

SEQ ID NO: 926 - DNA, 50 bp, Artificial Sequence
  Description of Artificial Sequence: Synthetic probe
caaaccratcatcrtaatacataaactcttcracaactcrtacaacttcc

SEQ ID NO: 927 - DNA, 50 bp, Artificial Sequence
  Description of Artificial Sequence: Synthetic probe
tgtatttaggtgttttttgttagattttattgatgtattttagtaggtgg

SEQ ID NO: 928 - DNA, 50 bp, Artificial Sequence
  Description of Artificial Sequence: Synthetic probe
acacccaaatatcccctaccaaacctcattaatatattccaacaaataac

SEQ ID NO: 929 - DNA, 50 bp, Artificial Sequence
  Description of Artificial Sequence: Synthetic probe
actccttcccttaatcatactaccctccraaaatcaatttaaatatcrcc

SEQ ID NO: 930 - DNA, 50 bp, Artificial Sequence
  Description of Artificial Sequence: Synthetic probe
ctaacttataaaaataaaatactcaatactacccaataccacaatacaac

SEQ ID NO: 931 - DNA, 50 bp, Artificial Sequence
  Description of Artificial Sequence: Synthetic probe
accaacraaaaaaacccaaaacrctacrattcacaaaatacrataacaac

SEQ ID NO: 932 - DNA, 50 bp, Artificial Sequence
  Description of Artificial Sequence: Synthetic probe
taaaaaaacctacctaaaactaaaatctaactccctaaaccrcctaaaac

SEQ ID NO: 933 - DNA, 50 bp, Artificial Sequence
  Description of Artificial Sequence: Synthetic probe
acrtctactaactaaatataccaacaactacctttatatatccctaaaac

SEQ ID NO: 934 - DNA, 50 bp, Artificial Sequence
  Description of Artificial Sequence: Synthetic probe
tacccaaaataccaacaaaacrtaaaaactaaatctatataaactacacc

SEQ ID NO: 935 - DNA, 50 bp, Artificial Sequence
  Description of Artificial Sequence: Synthetic probe
aacctcaattcacaacataaataaccaactcctaaaacattcacatccac

SEQ ID NO: 936 - DNA, 50 bp, Artificial Sequence
  Description of Artificial Sequence: Synthetic probe
aaaaaataacctaacrataaactaaaaaataataactataacccctaccc

SEQ ID NO: 937 - DNA, 50 bp, Artificial Sequence
  Description of Artificial Sequence: Synthetic probe
acaaccatatactaaactcatcactaaatattcctttataacrcataaac

SEQ ID NO: 938 - DNA, 50 bp, Artificial Sequence
  Description of Artificial Sequence: Synthetic probe
tcttaatttcacctctaaaatcraaataatctaatacctacttcacaaac

SEQ ID NO: 939 - DNA, 50 bp, Artificial Sequence
  Description of Artificial Sequence: Synthetic probe
actcaataataacaaattccttcaaatactccaaacacacaaaacaactc

SEQ ID NO: 940 - DNA, 50 bp, Artificial Sequence
  Description of Artificial Sequence: Synthetic probe
cctttacaatttcraaaacaaatttattaccataaaattcacattttaac

SEQ ID NO: 941 - DNA, 50 bp, Artificial Sequence
  Description of Artificial Sequence: Synthetic probe
caaatcrttaaaactaaaacaaataattacctttatacttctcaactccc

SEQ ID NO: 942 - DNA, 50 bp, Artificial Sequence
  Description of Artificial Sequence: Synthetic probe
cctccttcccaacaaaaaatccttaaaaattccraaatttttcactctac

SEQ ID NO: 943 - DNA, 50 bp, Artificial Sequence
  Description of Artificial Sequence: Synthetic probe
aaaaaaaaaatttatataaaataaaactctaaaactctacatcrctccac

SEQ ID NO: 944 - DNA, 50 bp, Artificial Sequence
  Description of Artificial Sequence: Synthetic probe
acaaaaaaccaaaaattttctaaaaactaaaatcctaccraccaaaaatc

SEQ ID NO: 945 - DNA, 50 bp, Artificial Sequence
  Description of Artificial Sequence: Synthetic probe
attccaacataaaataccttataattctaacttaaccacttaaaacaccc

SEQ ID NO: 946 - DNA, 50 bp, Artificial Sequence
  Description of Artificial Sequence: Synthetic probe
aaaaattaaacraaatacacataaacaaaacctcrccccrctttatctac

SEQ ID NO: 947 - DNA, 50 bp, Artificial Sequence
  Description of Artificial Sequence: Synthetic probe
taaaaaactccrtttactcaaatccttaactctctaactcaaatctccrc

SEQ ID NO: 948 - DNA, 50 bp, Artificial Sequence
  Description of Artificial Sequence: Synthetic probe
ctctcccatcccactcacctatccatttcctaatttaaacataattttac

SEQ ID NO: 949 - DNA, 50 bp, Artificial Sequence
  Description of Artificial Sequence: Synthetic probe
tttttttagttattaygagtttagagggatagtttaaggtttatygagtt

SEQ ID NO: 950 - DNA, 50 bp, Artificial Sequence
  Description of Artificial Sequence: Synthetic probe
taattatctcaattctatacacaacaatcaaataaacaaattttacaaac

SEQ ID NO: 951 - DNA, 50 bp, Artificial Sequence
  Description of Artificial Sequence: Synthetic probe
actataaaatcctaaaaaaatcctttaactttacaaaactccaactcctc

SEQ ID NO: 952 - DNA, 50 bp, Artificial Sequence
  Description of Artificial Sequence: Synthetic probe
tcacctaaactatctacaaatactacaacataaaataccaaaactaaacc

SEQ ID NO: 953 - DNA, 50 bp, Artificial Sequence
  Description of Artificial Sequence: Synthetic probe
acaaaccataactaacaccaacctaaaccaacctttaaaaaccttatttc

SEQ ID NO: 954 - DNA, 50 bp, Artificial Sequence
  Description of Artificial Sequence: Synthetic probe
aataatacrtacatacaacatatcatccaaacaaaactcacaataatacc

SEQ ID NO: 955 - DNA, 50 bp, Artificial Sequence
  Description of Artificial Sequence: Synthetic probe
tatactaaaactataaatcataaaaacccraaaactaccccccaaaaaac

SEQ ID NO: 956 - DNA, 50 bp, Artificial Sequence
  Description of Artificial Sequence: Synthetic probe
aggtggtgygtgtatatagtatgttatttaggtagagtttatagtagtat

SEQ ID NO: 957 - DNA, 50 bp, Artificial Sequence
  Description of Artificial Sequence: Synthetic probe
aactaaaaaattctacctaccratacaaaaccttcraatcrtccraaacc

SEQ ID NO: 958 - DNA, 50 bp, Artificial Sequence
  Description of Artificial Sequence: Synthetic probe
aaaatacaaccraaaaaataaacaaattataaaatactccrccrttccrc

SEQ ID NO: 959 - DNA, 50 bp, Artificial Sequence
  Description of Artificial Sequence: Synthetic probe
aaaaaaatcacaatattactataacataatctttaatatcacatcccatc

SEQ ID NO: 960 - DNA, 50 bp, Artificial Sequence
  Description of Artificial Sequence: Synthetic probe
aacttaatctaaattctaatttaacaaatcaaaaaacttaacaactaccc

SEQ ID NO: 961 - DNA, 50 bp, Artificial Sequence
  Description of Artificial Sequence: Synthetic probe
ttggatttgaggaggtttttataatagttatagtggttttagtatttygt

SEQ ID NO: 962 - DNA, 50 bp, Artificial Sequence
  Description of Artificial Sequence: Synthetic probe
aaaaaacaaactacccaattctaaataatcaatctttaacctaactccac

SEQ ID NO: 963 - DNA, 50 bp, Artificial Sequence
  Description of Artificial Sequence: Synthetic probe
ttacccaattctttttcaatttaaaccaaaatacccacaaaataataaca

SEQ ID NO: 964 - DNA, 50 bp, Artificial Sequence
  Description of Artificial Sequence: Synthetic probe
ccccctccccacaaaaaattaccttttccaaaaacaacaaaaatactaca

SEQ ID NO: 965 - DNA, 50 bp, Artificial Sequence
  Description of Artificial Sequence: Synthetic probe
tcccrattataaatatatctctccaaaaaacrctatatcccattaaacrc

SEQ ID NO: 966 - DNA, 50 bp, Artificial Sequence
  Description of Artificial Sequence: Synthetic probe
cccaattataaatatatctctccaaaaaacactatatcccattaaacaca

SEQ ID NO: 967 - DNA, 50 bp, Artificial Sequence
  Description of Artificial Sequence: Synthetic probe
aatatataattttaattttaaccrtaaaaatcaccaactacaaaacatac

SEQ ID NO: 968 - DNA, 50 bp, Artificial Sequence
  Description of Artificial Sequence: Synthetic probe
cccrccttcaaaatctaaaaccttccaaattaaatcrtaaaaacraaaac

SEQ ID NO: 969 - DNA, 50 bp, Artificial Sequence
  Description of Artificial Sequence: Synthetic probe
crtaacctatttccctttccttatttaatctaaatttctctaaaaaaaac

SEQ ID NO: 970 - DNA, 50 bp, Artificial Sequence
  Description of Artificial Sequence: Synthetic probe
tctaaacaaaccacttttaaaaataaacrttatctaataaacaaacracc

SEQ ID NO: 971 - DNA, 50 bp, Artificial Sequence
  Description of Artificial Sequence: Synthetic probe
taaccraaaaacraaaaacrtaaaaaccraaaacaacccccraaatcatc

SEQ ID NO: 972 - DNA, 50 bp, Artificial Sequence
  Description of Artificial Sequence: Synthetic probe
caaaaaccaacttcraataactaaaaatacaactccaacttcataaacac

SEQ ID NO: 973 - DNA, 50 bp, Artificial Sequence
  Description of Artificial Sequence: Synthetic probe
cttacaacctaaaaataactccctccttttctatctacaaaaaaaaaaca

SEQ ID NO: 974 - DNA, 50 bp, Artificial Sequence
  Description of Artificial Sequence: Synthetic probe
tcacaacctacctttccactttactattaaaaaaacttttaatcatacac

SEQ ID NO: 975 - DNA, 50 bp, Artificial Sequence
  Description of Artificial Sequence: Synthetic probe
aaaacttaacaataccaaaatatttactaaaactataaactctccaaccc

SEQ ID NO: 976 - DNA, 50 bp, Artificial Sequence
  Description of Artificial Sequence: Synthetic probe
atttgttttgttatyggtgggtttatggatgaagtataaatagtattatg

SEQ ID NO: 977 - DNA, 50 bp, Artificial Sequence
  Description of Artificial Sequence: Synthetic probe
tttactctactatcrataaactcataaataaaacataaacaacactatac

SEQ ID NO: 978 - DNA, 50 bp, Artificial Sequence
  Description of Artificial Sequence: Synthetic probe
tataaaaccracaataactacrattccracractaaacrattaaaacatc

SEQ ID NO: 979 - DNA, 50 bp, Artificial Sequence
  Description of Artificial Sequence: Synthetic probe
gtagagaatagagatttgtagttaaggtgtagagagaygtttttagtttt

SEQ ID NO: 980 - DNA, 50 bp, Artificial Sequence
  Description of Artificial Sequence: Synthetic probe
caaaaaacaaaaatctacaaccaaaatacaaaaaaacrccctcaaccccc

SEQ ID NO: 981 - DNA, 50 bp, Artificial Sequence
  Description of Artificial Sequence: Synthetic probe
ttaatcttattatcctcctcaaaaaaacracacccaccccattaacaaac

SEQ ID NO: 982 - DNA, 50 bp, Artificial Sequence
  Description of Artificial Sequence: Synthetic probe
tttaaataatatttggagtgatgataagtaggtttagagaattttygtgg

SEQ ID NO: 983 - DNA, 50 bp, Artificial Sequence
  Description of Artificial Sequence: Synthetic probe
aaacrccaaaaatcttaaacactttctaaatacctaacaatacactaaac

SEQ ID NO: 984 - DNA, 50 bp, Artificial Sequence
  Description of Artificial Sequence: Synthetic probe
taattaatttactaactacctcraaaaaccctattaccaaaatacttaac

SEQ ID NO: 985 - DNA, 50 bp, Artificial Sequence
  Description of Artificial Sequence: Synthetic probe
tctcctcaaacttcatatattaaaactctaatcccaaataataatattac

SEQ ID NO: 986 - DNA, 50 bp, Artificial Sequence
  Description of Artificial Sequence: Synthetic probe
ccttatcacccctttctcaaacraaaacatactaaaactctacraacaac

SEQ ID NO: 987 - DNA, 50 bp, Artificial Sequence
  Description of Artificial Sequence: Synthetic probe
tccaaaatccraaaactcttcctactactacrtcaccccaaaaaaacaac

SEQ ID NO: 988 - DNA, 50 bp, Artificial Sequence
  Description of Artificial Sequence: Synthetic probe
aaattttaatcccaaatctactattaactctatataactttacataaatc

SEQ ID NO: 989 - DNA, 50 bp, Artificial Sequence
  Description of Artificial Sequence: Synthetic probe
ttccctctaccaaataaacactcataaacaacctaactctacccataaac

SEQ ID NO: 990 - DNA, 50 bp, Artificial Sequence
  Description of Artificial Sequence: Synthetic probe
cacaattactcacccctcctattcatacacttatacacaaaaatacccac

SEQ ID NO: 991 - DNA, 50 bp, Artificial Sequence
  Description of Artificial Sequence: Synthetic probe
attataactcccacaattcccctcatactataaaaaatttttctcttttc

SEQ ID NO: 992 - DNA, 50 bp, Artificial Sequence
  Description of Artificial Sequence: Synthetic probe
tttatgagatttatttatagttatgagaatagtaagagaaagatgattgg

SEQ ID NO: 993 - DNA, 50 bp, Artificial Sequence
  Description of Artificial Sequence: Synthetic probe
atataaacttcrtatttaactttaatcttaaacaaccttaaaatctctcc

SEQ ID NO: 994 - DNA, 50 bp, Artificial Sequence
  Description of Artificial Sequence: Synthetic probe
tagggatttataggttttattaaagaaaagtttagygtaggtttayggta

SEQ ID NO: 995 - DNA, 50 bp, Artificial Sequence
  Description of Artificial Sequence: Synthetic probe
taacataccaatctcattacatcttctatataataccttaatattacaac

SEQ ID NO: 996 - DNA, 50 bp, Artificial Sequence
  Description of Artificial Sequence: Synthetic probe
atcaataacttcatattaactaattaacaaaaaaaactatataatacatc

SEQ ID NO: 997 - DNA, 50 bp, Artificial Sequence
  Description of Artificial Sequence: Synthetic probe
atccaaaaaaaatttctctaaatacttctaactcaaaacctctcacaaca

SEQ ID NO: 998 - DNA, 50 bp, Artificial Sequence
  Description of Artificial Sequence: Synthetic probe
catttaaaccctcaaataattcaaccctaaaaaacaactaaactacaaca

SEQ ID NO: 999 - DNA, 50 bp, Artificial Sequence
  Description of Artificial Sequence: Synthetic probe
taaaaatttaatatcttacaccrtaaaaaaaccttaaattctattttaac

SEQ ID NO: 1000 - DNA, 50 bp, Artificial Sequence
  Description of Artificial Sequence: Synthetic probe
tatattttctaaataataatcataaaatcaatcactccaccttctctcac

SEQ ID NO: 1001 - DNA, 50 bp, Artificial Sequence
  Description of Artificial Sequence: Synthetic probe
cctctacaaataaacccrctccctctactcctaaaactcraactaattac

SEQ ID NO: 1002 - DNA, 50 bp, Artificial Sequence
  Description of Artificial Sequence: Synthetic probe
aataaataaacaaataaacaatataataccttataaattcaacaaaaacc

SEQ ID NO: 1003 - DNA, 50 bp, Artificial Sequence
  Description of Artificial Sequence: Synthetic probe
atgttgtttaaagttaagtttgtttgtattggaataaatagatgatgatt

SEQ ID NO: 1004 - DNA, 50 bp, Artificial Sequence
  Description of Artificial Sequence: Synthetic probe
aaaacraaaaaatacaccaaaaaaacraaaccttccaattattatattac

SEQ ID NO: 1005 - DNA, 50 bp, Artificial Sequence
  Description of Artificial Sequence: Synthetic probe
rcttcccraaacctttaaattaatctatctaaccacctcatttacataac

SEQ ID NO: 1006 - DNA, 50 bp, Artificial Sequence
  Description of Artificial Sequence: Synthetic probe
ccattatcacctttacctcaaaacccaaaatcctcatatctatcctaaac

SEQ ID NO: 1007 - DNA, 50 bp, Artificial Sequence
  Description of Artificial Sequence: Synthetic probe
gttggtattttttaggttgttgattattttagttatatttygggagttgt

SEQ ID NO: 1008 - DNA, 50 bp, Artificial Sequence
  Description of Artificial Sequence: Synthetic probe
ttaacattttccaaactactaatcacctcaatcatatcccraaaattatc

SEQ ID NO: 1009 - DNA, 50 bp, Artificial Sequence
  Description of Artificial Sequence: Synthetic probe
attagaaagtagtgtatttaygttgataggtttgattttttgtggttgtt

SEQ ID NO: 1010 - DNA, 50 bp, Artificial Sequence
  Description of Artificial Sequence: Synthetic probe
tcaaaaaacaatacactcacrctaacaaacttaatcccctataactactc

SEQ ID NO: 1011 - DNA, 50 bp, Artificial Sequence
  Description of Artificial Sequence: Synthetic probe
tacaaaatcacaatatccaattcccaaaatccaatcctatactcctccca

SEQ ID NO: 1012 - DNA, 50 bp, Artificial Sequence
  Description of Artificial Sequence: Synthetic probe
raaaatttaatatacaattaaaaattaacaaatctaacacccrcrctacc

SEQ ID NO: 1013 - DNA, 50 bp, Artificial Sequence
  Description of Artificial Sequence: Synthetic probe
cacraaaactatacrtctcaacaatttattacractaaactcrctcctcc

SEQ ID NO: 1014 - DNA, 50 bp, Artificial Sequence
  Description of Artificial Sequence: Synthetic probe
cacttcacaaataaaaaacttaaaacaaatcaccaacccctaatcatttc

SEQ ID NO: 1015 - DNA, 50 bp, Artificial Sequence
  Description of Artificial Sequence: Synthetic probe
atcaaaaactaacctaaaaatcaaaaactctaatccttactcttttaaac

SEQ ID NO: 1016 - DNA, 50 bp, Artificial Sequence
  Description of Artificial Sequence: Synthetic probe
atctatatctctacccaccctctacctatatataacatcctataaatatc

SEQ ID NO: 1017 - DNA, 50 bp, Artificial Sequence
  Description of Artificial Sequence: Synthetic probe
tygaaggtaaataggttaattagygtttagattttttagttayggtagtt

SEQ ID NO: 1018 - DNA, 50 bp, Artificial Sequence
  Description of Artificial Sequence: Synthetic probe
craaaacaaataaaccaatcaacrtccaaactcttcaactacracaatcc

SEQ ID NO: 1019 - DNA, 50 bp, Artificial Sequence
  Description of Artificial Sequence: Synthetic probe
aaaaaaccrcataacccaaacctatatcccraaacccaaaacrctataac

SEQ ID NO: 1020 - DNA, 50 bp, Artificial Sequence
  Description of Artificial Sequence: Synthetic probe
aacctaaacataaaccttacaaaaaaactaccctctaacccaactttctc

SEQ ID NO: 1021 - DNA, 50 bp, Artificial Sequence
  Description of Artificial Sequence: Synthetic probe
aactaaatcctactacaaatttccrtttaccttatctaaataaataaacc

SEQ ID NO: 1022 - DNA, 50 bp, Artificial Sequence
  Description of Artificial Sequence: Synthetic probe
aaaataaaccacrataaaatcattactattactccttaaacttcctcrcc

SEQ ID NO: 1023 - DNA, 50 bp, Artificial Sequence
  Description of Artificial Sequence: Synthetic probe
ttaaaaatacccaacctcracrtaataaatatcraatcttaaaatcacac

SEQ ID NO: 1024 - DNA, 50 bp, Artificial Sequence
  Description of Artificial Sequence: Synthetic probe
aaactcatacactaaatataaacraatatttacttaaccaccrcctatac

SEQ ID NO: 1025 - DNA, 50 bp, Artificial Sequence
  Description of Artificial Sequence: Synthetic probe
actaaacaaaacaaccaaaaccataactcacaaaaaaatcctaactctac

SEQ ID NO: 1026 - DNA, 50 bp, Artificial Sequence
  Description of Artificial Sequence: Synthetic probe
tttggygtatagtggttattgtaatatattttaaagattgaaggagttag

SEQ ID NO: 1027 - DNA, 50 bp, Artificial Sequence
  Description of Artificial Sequence: Synthetic probe
ctaacrcacaataaccattacaatacaccctaaaaactaaaaaaaccaac

SEQ ID NO: 1028 - DNA, 50 bp, Artificial Sequence
  Description of Artificial Sequence: Synthetic probe
cctccaatactacraaaactataacacccacttccaaaattccaaccacc

SEQ ID NO: 1029 - DNA, 50 bp, Artificial Sequence
  Description of Artificial Sequence: Synthetic probe
acacacaacacctttaaataaccrcraatataccraacraaaaaaaacac

SEQ ID NO: 1030 - DNA, 50 bp, Artificial Sequence
  Description of Artificial Sequence: Synthetic probe
aaattcccaaaaaaatctaaacaactaataaccccrccccctctcttatc

SEQ ID NO: 1031 - DNA, 50 bp, Artificial Sequence
  Description of Artificial Sequence: Synthetic probe
accctatctctactaacaatacaaaaattaaccaaatataataatacaca

SEQ ID NO: 1032 - DNA, 50 bp, Artificial Sequence
  Description of Artificial Sequence: Synthetic probe
atcctaaacaaatcacaaactccaaacatcaattttctcaccacacaaca

SEQ ID NO: 1033 - DNA, 50 bp, Artificial Sequence
  Description of Artificial Sequence: Synthetic probe
tcctactacaacctctcaaaaactatttccacctaatacttcttactttc

SEQ ID NO: 1034 - DNA, 50 bp, Artificial Sequence
  Description of Artificial Sequence: Synthetic probe
taaaccccttcctaaccatatctaccttttatcccttaaaaactcaaatc

SEQ ID NO: 1035 - DNA, 50 bp, Artificial Sequence
  Description of Artificial Sequence: Synthetic probe
ttggtattttaggttgttatttattttggttataygtaggagtatagata

SEQ ID NO: 1036 - DNA, 50 bp, Artificial Sequence
  Description of Artificial Sequence: Synthetic probe
tggtattttaggttgttatttattttggttatatgtaggagtatagatat

SEQ ID NO: 1037 - DNA, 50 bp, Artificial Sequence
  Description of Artificial Sequence: Synthetic probe
tccrctcrtaattaaccctaaattccraaccccaatttcattaaataaac

SEQ ID NO: 1038 - DNA, 50 bp, Artificial Sequence
  Description of Artificial Sequence: Synthetic probe
cttactcaataaataaaacrtaataactctaaacaaacctcaattatctc

SEQ ID NO: 1039 - DNA, 50 bp, Artificial Sequence
  Description of Artificial Sequence: Synthetic probe
ctaaacrctcaaaaaaaattaaacaaacrtcrctacccattactctaaac

SEQ ID NO: 1040 - DNA, 50 bp, Artificial Sequence
  Description of Artificial Sequence: Synthetic probe
gggttagtagttagagtgatatttgagtttagttatagagattgtaggta

SEQ ID NO: 1041 - DNA, 50 bp, Artificial Sequence
  Description of Artificial Sequence: Synthetic probe
aaccaacaatcaaaataacacctaaacccaaccataaaaattacaaacac

SEQ ID NO: 1042 - DNA, 50 bp, Artificial Sequence
  Description of Artificial Sequence: Synthetic probe
cttccttccttccttcctcactttctttcctctttctttttaaaacaaca

SEQ ID NO: 1043 - DNA, 50 bp, Artificial Sequence
  Description of Artificial Sequence: Synthetic probe
aaacaacaaaacaacaataccaacaacaaaattacaaccaacaactttcc

SEQ ID NO: 1044 - DNA, 50 bp, Artificial Sequence
  Description of Artificial Sequence: Synthetic probe
tcaaaacaaacracctaattaaactatctctaatcttcaaaatcraccac

SEQ ID NO: 1045 - DNA, 50 bp, Artificial Sequence
  Description of Artificial Sequence: Synthetic probe
attctaaaatacrtataatacccttatctccaaaaacrcaaaaaatcctc

SEQ ID NO: 1046 - DNA, 50 bp, Artificial Sequence
  Description of Artificial Sequence: Synthetic probe
aactaaccacaaccttaacaaaactctatccractaccacaataaaactc

SEQ ID NO: 1047 - DNA, 50 bp, Artificial Sequence
  Description of Artificial Sequence: Synthetic probe
gagtgtaagttttgtaaattggatatgtagtttagtaagttggagtttta

SEQ ID NO: 1048 - DNA, 50 bp, Artificial Sequence
  Description of Artificial Sequence: Synthetic probe
aatataaattctacaaactaaacatacaactcaacaaactaaaactccac

SEQ ID NO: 1049 - DNA, 50 bp, Artificial Sequence
  Description of Artificial Sequence: Synthetic probe
acaaaccaataatttactaatacactaacctaaacaccaaaaaaatccac

SEQ ID NO: 1050 - DNA, 50 bp, Artificial Sequence
  Description of Artificial Sequence: Synthetic probe
aaaactaaaaatcaaataattcacttattctacaccatccccataacctc

SEQ ID NO: 1051 - DNA, 50 bp, Artificial Sequence
  Description of Artificial Sequence: Synthetic probe
actattaaaaaatttaactcattatttcaaccrcctcacccctcactatc

SEQ ID NO: 1052 - DNA, 50 bp, Artificial Sequence
  Description of Artificial Sequence: Synthetic probe
ctccaacttaccaaaactaaaaccrctattaaccctctaaaactcrtatc

SEQ ID NO: 1053 - DNA, 50 bp, Artificial Sequence
  Description of Artificial Sequence: Synthetic probe
cttatctaatcccaactaacttatatcatcaaaccaaaccttccccctac

SEQ ID NO: 1054 - DNA, 50 bp, Artificial Sequence
  Description of Artificial Sequence: Synthetic probe
ataaaccactacrcctaaccaaaattccttactcttaacccatcctaacc

SEQ ID NO: 1055 - DNA, 50 bp, Artificial Sequence
  Description of Artificial Sequence: Synthetic probe
taaactaaatccataccraaaatttctccctaatttctcaacccccraac

SEQ ID NO: 1056 - DNA, 50 bp, Artificial Sequence
  Description of Artificial Sequence: Synthetic probe
atcacrtcracraaaaacaaatacrctccctactacaatcaccaaaaaac

SEQ ID NO: 1057 - DNA, 50 bp, Artificial Sequence
  Description of Artificial Sequence: Synthetic probe
attcttttataataaaatctcccaacaccttatactttttcctttataac

SEQ ID NO: 1058 - DNA, 50 bp, Artificial Sequence
  Description of Artificial Sequence: Synthetic probe
ttataacataaacactaaacaacraacaacttcattacaattcracaaac

SEQ ID NO: 1059 - DNA, 50 bp, Artificial Sequence
  Description of Artificial Sequence: Synthetic probe
ttcrcaacaccttttaaaataaataaatactataactataccccttacac

SEQ ID NO: 1060 - DNA, 50 bp, Artificial Sequence
  Description of Artificial Sequence: Synthetic probe
tataatcaaatctacacaataactcacaacaaccaacaaaacttcaaaac

SEQ ID NO: 1061 - DNA, 50 bp, Artificial Sequence
  Description of Artificial Sequence: Synthetic probe
atataacccttttctcccataacttcctatataaaataaatcaccaaaac

SEQ ID NO: 1062 - DNA, 50 bp, Artificial Sequence
  Description of Artificial Sequence: Synthetic probe
aatatatcccaaaataaaaaaccatcaaatctcccacataaaacattttc

SEQ ID NO: 1063 - DNA, 50 bp, Artificial Sequence
  Description of Artificial Sequence: Synthetic probe
aaatgtgttttaggataggaggttattagattttttatatgaggtatttt

SEQ ID NO: 1064 - DNA, 50 bp, Artificial Sequence
  Description of Artificial Sequence: Synthetic probe
taaaaattataaaaatcatatatatttccttcatcccaacataactaaac

SEQ ID NO: 1065 - DNA, 50 bp, Artificial Sequence
  Description of Artificial Sequence: Synthetic probe
gtgttgtgttgtattgaagttgtgttgaagattgtgtttgattttgttga

SEQ ID NO: 1066 - DNA, 50 bp, Artificial Sequence
  Description of Artificial Sequence: Synthetic probe
crtcaaaacraatcataaaatccaaaactaaactatacactctcttaaac

SEQ ID NO: 1067 - DNA, 50 bp, Artificial Sequence
  Description of Artificial Sequence: Synthetic probe
actctcrcctcacrtaacctacraaactaacctataattaaccacttaac

SEQ ID NO: 1068 - DNA, 50 bp, Artificial Sequence
  Description of Artificial Sequence: Synthetic probe
crttcctctcrtaacctaatcatatatccttcttcctaaatactcataac

SEQ ID NO: 1069 - DNA, 50 bp, Artificial Sequence
  Description of Artificial Sequence: Synthetic probe
attggtttttttagaaattygatatttattgggaatgagaattgagtttg

SEQ ID NO: 1070 - DNA, 50 bp, Artificial Sequence
  Description of Artificial Sequence: Synthetic probe
ttaacttctctaaaaacccracacccattaaaaataaaaactaaatctac

SEQ ID NO: 1071 - DNA, 50 bp, Artificial Sequence
  Description of Artificial Sequence: Synthetic probe
tcttcaaacatccaactaaaaactttaattctctaataccccaccrtacc

SEQ ID NO: 1072 - DNA, 50 bp, Artificial Sequence
  Description of Artificial Sequence: Synthetic probe
ctcaccrctcatttaaaaacatcttaataatactttttaacacaactttc

SEQ ID NO: 1073 - DNA, 50 bp, Artificial Sequence
  Description of Artificial Sequence: Synthetic probe
ttattctttataaattctcraaattcraaaataactacacaatcaacrcc

SEQ ID NO: 1074 - DNA, 50 bp, Artificial Sequence
  Description of Artificial Sequence: Synthetic probe
aaacaacccataaacaaatacttcaataaccaaaaaaactttataaaaca

SEQ ID NO: 1075 - DNA, 50 bp, Artificial Sequence
  Description of Artificial Sequence: Synthetic probe
taaaccacratacccaatcaaataataaccctaatcctttttaatctacc

SEQ ID NO: 1076 - DNA, 50 bp, Artificial Sequence
  Description of Artificial Sequence: Synthetic probe
aattaaaattataccactatactccaacccraacracaatacaaaccttc

SEQ ID NO: 1077 - DNA, 50 bp, Artificial Sequence
  Description of Artificial Sequence: Synthetic probe
ttctcttaaaaaaaattccttcccctacccttaataatctctaaaatcrc

SEQ ID NO: 1078 - DNA, 50 bp, Artificial Sequence
  Description of Artificial Sequence: Synthetic probe
aaaatcattaaaccactataccccaacctaaactacaaaaccaaactcca

SEQ ID NO: 1079 - DNA, 50 bp, Artificial Sequence
  Description of Artificial Sequence: Synthetic probe
caaaatctactcatctctttcaataaatattctccataactaatactaac

SEQ ID NO: 1080 - DNA, 50 bp, Artificial Sequence
  Description of Artificial Sequence: Synthetic probe
accracrctaaacaaaaaattacatcccaaaatttacaaatatacaaaac

SEQ ID NO: 1081 - DNA, 50 bp, Artificial Sequence
  Description of Artificial Sequence: Synthetic probe
gatygaygttgagtaagggattatattttaagatttataggtgtgtagaa

SEQ ID NO: 1082 - DNA, 50 bp, Artificial Sequence
  Description of Artificial Sequence: Synthetic probe
acaactaccaaacaatctctttcatctccaaatccacataaaactcctca

SEQ ID NO: 1083 - DNA, 50 bp, Artificial Sequence
  Description of Artificial Sequence: Synthetic probe
tattagttttayggtttttttggttagtatatttatgaatttgatggaga

SEQ ID NO: 1084 - DNA, 50 bp, Artificial Sequence
  Description of Artificial Sequence: Synthetic probe
attagttttatggtttttttggttagtatatttatgaatttgatggagat

SEQ ID NO: 1085 - DNA, 50 bp, Artificial Sequence
  Description of Artificial Sequence: Synthetic probe
aaaaacaatcaaattctattaaaataacccttataactctctaaaataac

SEQ ID NO: 1086 - DNA, 50 bp, Artificial Sequence
  Description of Artificial Sequence: Synthetic probe
aactaatacaaataatatttccacaactaaaacaaaattaaaaaatcacc

SEQ ID NO: 1087 - DNA, 50 bp, Artificial Sequence
  Description of Artificial Sequence: Synthetic probe
ataaaaacacaaacaaaaacacacacactcccaaatacttacctcccatc

SEQ ID NO: 1088 - DNA, 50 bp, Artificial Sequence
  Description of Artificial Sequence: Synthetic probe
aataacraaaactatacraactatcraaaaacccatacaccacrataacc

SEQ ID NO: 1089 - DNA, 50 bp, Artificial Sequence
  Description of Artificial Sequence: Synthetic probe
tcctttttttctttaaattcttctaaatcctaaataatttctacttaaac

SEQ ID NO: 1090 - DNA, 50 bp, Artificial Sequence
  Description of Artificial Sequence: Synthetic probe
taaactttacrtattttacctactaaaacccrtttaaactcaaaaaatcc

SEQ ID NO: 1091 - DNA, 50 bp, Artificial Sequence
  Description of Artificial Sequence: Synthetic probe
atatttatatataataaaaccaaaaatcatctcttttacaaattaaattc

SEQ ID NO: 1092 - DNA, 50 bp, Artificial Sequence
  Description of Artificial Sequence: Synthetic probe
ccractaaaccatatcraaactaaataactacttaaaaaccataaactac

SEQ ID NO: 1093 - DNA, 50 bp, Artificial Sequence
  Description of Artificial Sequence: Synthetic probe
agttttagtttttatgaygttaagattggttttatataaggtgaggggtt

SEQ ID NO: 1094 - DNA, 50 bp, Artificial Sequence
  Description of Artificial Sequence: Synthetic probe
aaaatcraaccaaaatccrtaatcccaatccctaaaaaaaatttaaaacc

SEQ ID NO: 1095 - DNA, 50 bp, Artificial Sequence
  Description of Artificial Sequence: Synthetic probe
tccaaaatcttctaaaatactcccacttaattacatatataaaaccraac

SEQ ID NO: 1096 - DNA, 50 bp, Artificial Sequence
  Description of Artificial Sequence: Synthetic probe
rtaaacctacrctaaacttttctttaataaaacctataaatccctaaacc

SEQ ID NO: 1097 - DNA, 50 bp, Artificial Sequence
  Description of Artificial Sequence: Synthetic probe
taaatagagaaggaaaagttattagttggtaaatatygtagaaggtagag

SEQ ID NO: 1098 - DNA, 50 bp, Artificial Sequence
  Description of Artificial Sequence: Synthetic probe
tcataaaatcaaaaaatcaaaaccatcctaaacaacataataaaacccca

SEQ ID NO: 1099 - DNA, 50 bp, Artificial Sequence
  Description of Artificial Sequence: Synthetic probe
tctacacacctataaatcttaaaatataatcccttactcaacrtcratcc

SEQ ID NO: 1100 - DNA, 50 bp, Artificial Sequence
  Description of Artificial Sequence: Synthetic probe
ttttgtatatttgtaaattttgggatgtaattttttgtttagygtyggtt

SEQ ID NO: 1101 - DNA, 50 bp, Artificial Sequence
  Description of Artificial Sequence: Synthetic probe
taaatatccacaattacataaaaaactattaaaaataatcctcccaatcc

SEQ ID NO: 1102 - DNA, 50 bp, Artificial Sequence
  Description of Artificial Sequence: Synthetic probe
accrcaacrctctaaatccctcccrctaatctaatatcatttcaataaac

SEQ ID NO: 1103 - DNA, 50 bp, Artificial Sequence
  Description of Artificial Sequence: Synthetic probe
aatcttactaaaaaacacaaatctctcractacaacctccttatctcttc

SEQ ID NO: 1104 - DNA, 50 bp, Artificial Sequence
  Description of Artificial Sequence: Synthetic probe
tttctcctaaatatactacaaaatacaaactctatctccctaccattcca

SEQ ID NO: 1105 - DNA, 50 bp, Artificial Sequence
  Description of Artificial Sequence: Synthetic probe
acracraaaacaatcrtcatctaaaatttccctaacaataaaacraaccc

SEQ ID NO: 1106 - DNA, 50 bp, Artificial Sequence
  Description of Artificial Sequence: Synthetic probe
aaaaaatcctccccttacaaccrtaaccactactatccaaaaactactac

SEQ ID NO: 1107 - DNA, 50 bp, Artificial Sequence
  Description of Artificial Sequence: Synthetic probe
tactactaaattaataaattcaccaaaccctaaaaacttttcaaaccatc

SEQ ID NO: 1108 - DNA, 50 bp, Artificial Sequence
  Description of Artificial Sequence: Synthetic probe
aagagataaatatttgtgtgtgagagagaattgtgtagagtttagaattg

SEQ ID NO: 1109 - DNA, 50 bp, Artificial Sequence
  Description of Artificial Sequence: Synthetic probe
aaaaaaccaattctctaaaatcccttcttaaacaaaaataccaactcatc

SEQ ID NO: 1110 - DNA, 50 bp, Artificial Sequence
  Description of Artificial Sequence: Synthetic probe
ctatctaaccacctcatttacataacrtaatataataactaaaaaacccc

SEQ ID NO: 1111 - DNA, 50 bp, Artificial Sequence
  Description of Artificial Sequence: Synthetic probe
aaaacacaaaactaaaaaaaactctttctaaatcttatccaaaaaccccc

SEQ ID NO: 1112 - DNA, 50 bp, Artificial Sequence
  Description of Artificial Sequence: Synthetic probe
tttaagggattgattaaggatagaaataggagaatatttgtgtgtttttt

SEQ ID NO: 1113 - DNA, 50 bp, Artificial Sequence
  Description of Artificial Sequence: Synthetic probe
acttaatttccaaaaaataacctaaccccrctactcctataacaaaaatc

SEQ ID NO: 1114 - DNA, 50 bp, Artificial Sequence
  Description of Artificial Sequence: Synthetic probe
aaaaccaattctacaaattaacctttctattctataaaataccatctatc

SEQ ID NO: 1115 - DNA, 50 bp, Artificial Sequence
  Description of Artificial Sequence: Synthetic probe
ccaaaatataatccaaattttcacrctacaaaccctaatctctcctcacc

SEQ ID NO: 1116 - DNA, 50 bp, Artificial Sequence
  Description of Artificial Sequence: Synthetic probe
tacaccctaactctctaaaataatcttattcatcccctataaacaatccc

SEQ ID NO: 1117 - DNA, 50 bp, Artificial Sequence
  Description of Artificial Sequence: Synthetic probe
acatcctccataccctttacacattccatatctacctaaaaaccctaaac

SEQ ID NO: 1118 - DNA, 50 bp, Artificial Sequence
  Description of Artificial Sequence: Synthetic probe
caaaacaaacraaaatctacaacaaaactcaacttaatacacacaactcc

SEQ ID NO: 1119 - DNA, 50 bp, Artificial Sequence
  Description of Artificial Sequence: Synthetic probe
catcatctactaattaataccatttatttaacatcctaaaattacaacac

SEQ ID NO: 1120 - DNA, 50 bp, Artificial Sequence
  Description of Artificial Sequence: Synthetic probe
ctactcaacaatatatttttctctattaaaaacaataaataccctttaac

SEQ ID NO: 1121 - DNA, 50 bp, Artificial Sequence
  Description of Artificial Sequence: Synthetic probe
taaatttcratatctctacacactcttaaaaattaatcctaactaaacrc

SEQ ID NO: 1122 - DNA, 50 bp, Artificial Sequence
  Description of Artificial Sequence: Synthetic probe
taaaccttctaacattaaaaataaacttttccaactaaaaacctacattc

SEQ ID NO: 1123 - DNA, 50 bp, Artificial Sequence
  Description of Artificial Sequence: Synthetic probe
ttgaattttttggtattggaagtgagtttttttagttgagggtttgtatt

SEQ ID NO: 1124 - DNA, 50 bp, Artificial Sequence
  Description of Artificial Sequence: Synthetic probe
ataataattatttaattccaacrccaaacaccaaaaataaactaccctac

SEQ ID NO: 1125 - DNA, 50 bp, Artificial Sequence
  Description of Artificial Sequence: Synthetic probe
tatggtggttgtttaattttagygttaaatattagaagtgggttgttttg

SEQ ID NO: 1126 - DNA, 50 bp, Artificial Sequence
  Description of Artificial Sequence: Synthetic probe
taaaaaacraaatccctaattctaacaaaatacaataaacctataaacrc

SEQ ID NO: 1127 - DNA, 50 bp, Artificial Sequence
  Description of Artificial Sequence: Synthetic probe
acccaaaaaacaaaacttacaataaaccaaaataacaccactacaatcca

SEQ ID NO: 1128 - DNA, 50 bp, Artificial Sequence
  Description of Artificial Sequence: Synthetic probe
atcctattctaaataaaaaacraattcattcaaatcaataatttcaaacc

SEQ ID NO: 1129 - DNA, 50 bp, Artificial Sequence
  Description of Artificial Sequence: Synthetic probe
aaaaaaaacataaaacatcrcraaaatactcccccrataaataaaaactc

SEQ ID NO: 1130 - DNA, 50 bp, Artificial Sequence
  Description of Artificial Sequence: Synthetic probe
tatcacccttaacctccctctccatacttaaaataaaaaaactaaactac

SEQ ID NO: 1131 - DNA, 50 bp, Artificial Sequence
  Description of Artificial Sequence: Synthetic probe
ccaactctacctaataccctttatcttaaacctcttatctaaaaataaac

SEQ ID NO: 1132 - DNA, 50 bp, Artificial Sequence
  Description of Artificial Sequence: Synthetic probe
aaacaaaaacactccccacatctcaaataataaacaaccaaacaaaaaca

SEQ ID NO: 1133 - DNA, 50 bp, Artificial Sequence
  Description of Artificial Sequence: Synthetic probe
ataaaaaccctaaacaccacctactctaaaactacctaccaaaccraaac

SEQ ID NO: 1134 - DNA, 50 bp, Artificial Sequence
  Description of Artificial Sequence: Synthetic probe
rtcrtaaacctaaacrcttatataccrtaacatactcttctactcaaaac

SEQ ID NO: 1135 - DNA, 50 bp, Artificial Sequence
  Description of Artificial Sequence: Synthetic probe
aacattaaaatcctaaactcctcctctactaaataaaaccrcraaccctc

SEQ ID NO: 1136 - DNA, 50 bp, Artificial Sequence
  Description of Artificial Sequence: Synthetic probe
ttaaaaaatttctatatttcaaaatctataatcrcactctaaaatctttc

SEQ ID NO: 1137 - DNA, 50 bp, Artificial Sequence
  Description of Artificial Sequence: Synthetic probe
ttggttyggagatggataatttagagatttaaaatttatgaagaagattt

SEQ ID NO: 1138 - DNA, 50 bp, Artificial Sequence
  Description of Artificial Sequence: Synthetic probe
rcaataacaccccttccrccaaatttatttctctttctttcaacrcctac

SEQ ID NO: 1139 - DNA, 50 bp, Artificial Sequence
  Description of Artificial Sequence: Synthetic probe
aacaacactattttaaactataaaacataaaaacrttaaatcccctcatc

SEQ ID NO: 1140 - DNA, 50 bp, Artificial Sequence
  Description of Artificial Sequence: Synthetic probe
tggtaatattgttttagattgtggggtatgggaaygttagatttttttat

SEQ ID NO: 1141 - DNA, 50 bp, Artificial Sequence
  Description of Artificial Sequence: Synthetic probe
crtcttttaaaaaatcaatccctccttaattacccrcctcaactaaaacc

SEQ ID NO: 1142 - DNA, 50 bp, Artificial Sequence
  Description of Artificial Sequence: Synthetic probe
ataaccrtctttttccattaaaccttcrtcrattcactatattaaactac

SEQ ID NO: 1143 - DNA, 50 bp, Artificial Sequence
  Description of Artificial Sequence: Synthetic probe
ataataaaaccaataaaaatcraccatctaaaaacccaacrttccraaac

SEQ ID NO: 1144 - DNA, 50 bp, Artificial Sequence
  Description of Artificial Sequence: Synthetic probe
aaataaactttaaactactactaacccacrcrcraaaactaaacrtactc

SEQ ID NO: 1145 - DNA, 50 bp, Artificial Sequence
  Description of Artificial Sequence: Synthetic probe
aatcaaaaaacactttacaattctcactttatttaacctctaaaacattc

SEQ ID NO: 1146 - DNA, 50 bp, Artificial Sequence
  Description of Artificial Sequence: Synthetic probe
atagaagttaagggtagagagaatgttaggaaggaaatatgattaaatgt

SEQ ID NO: 1147 - DNA, 50 bp, Artificial Sequence
  Description of Artificial Sequence: Synthetic probe
tatactcaaaaaaccctcaatttctacctcttacctaccaaaataatacc

SEQ ID NO: 1148 - DNA, 50 bp, Artificial Sequence
  Description of Artificial Sequence: Synthetic probe
tttctaacaaacaacaaacaaatcttcracaataaaaacaataaaccctc

SEQ ID NO: 1149 - DNA, 50 bp, Artificial Sequence
  Description of Artificial Sequence: Synthetic probe
tctaaaaatcrcataaaaaaactataatatcctaaatccraacracrccc

SEQ ID NO: 1150 - DNA, 50 bp, Artificial Sequence
  Description of Artificial Sequence: Synthetic probe
tagttttaattagaagattagaagttagttaggagttgggagtagtgtta

SEQ ID NO: 1151 - DNA, 50 bp, Artificial Sequence
  Description of Artificial Sequence: Synthetic probe
cattatctcattcaatccttcaaatacctatatactaaatattatcatcc

SEQ ID NO: 1152 - DNA, 50 bp, Artificial Sequence
  Description of Artificial Sequence: Synthetic probe
tatataaatatattccaacaattaattactaaacaaaaaataatcttaac

SEQ ID NO: 1153 - DNA, 50 bp, Artificial Sequence
  Description of Artificial Sequence: Synthetic probe
caatcrcaacaaactactaaaacrcacaatctccrtaccrataaaaaaac

SEQ ID NO: 1154 - DNA, 50 bp, Artificial Sequence
  Description of Artificial Sequence: Synthetic probe
ccaattctcactcccactaaatatcaaatttctaaaaaaaccaatcaaca

SEQ ID NO: 1155 - DNA, 50 bp, Artificial Sequence
  Description of Artificial Sequence: Synthetic probe
taaaaaaacaatataccttttcttttcataaactaaaatataaacctaac

SEQ ID NO: 1156 - DNA, 50 bp, Artificial Sequence
  Description of Artificial Sequence: Synthetic probe
tatcatccccaacatattaccctcatcctcctaataaaaaacraatctcc

SEQ ID NO: 1157 - DNA, 50 bp, Artificial Sequence
  Description of Artificial Sequence: Synthetic probe
tttacttctaatattaactactatttcaaatttattaaaatccatataac

SEQ ID NO: 1158 - DNA, 50 bp, Artificial Sequence
  Description of Artificial Sequence: Synthetic probe
aaataattttataaaaattaatatatttctccctatttcccracaaatac

SEQ ID NO: 1159 - DNA, 50 bp, Artificial Sequence
  Description of Artificial Sequence: Synthetic probe
aacctactttctcrattaaaaactaatatatataacaaaaacccrctaac

SEQ ID NO: 1160 - DNA, 50 bp, Artificial Sequence
  Description of Artificial Sequence: Synthetic probe
ctataaccctcaccaaacctaacaactacctaacaacttatctaactcac

SEQ ID NO: 1161 - DNA, 50 bp, Artificial Sequence
  Description of Artificial Sequence: Synthetic probe
aaacttactaaaatcacttcctaaatctaaacaacttaaattataaacac

SEQ ID NO: 1162 - DNA, 50 bp, Artificial Sequence
  Description of Artificial Sequence: Synthetic probe
tctatttcaaccraaaaaacactaacaactaaaaaaaaaccacacrtaac

SEQ ID NO: 1163 - DNA, 50 bp, Artificial Sequence
  Description of Artificial Sequence: Synthetic probe
aggatttattggggttattttttaaatttgaataatttaggttatgggta

SEQ ID NO: 1164 - DNA, 50 bp, Artificial Sequence
  Description of Artificial Sequence: Synthetic probe
ctaaaacctaccraaaaacctacacccatttcattctccattacaaaatc

SEQ ID NO: 1165 - DNA, 50 bp, Artificial Sequence
  Description of Artificial Sequence: Synthetic probe
aacaaaaaacrcctctatctactcctaaccccttaccccacaaaatattc

SEQ ID NO: 1166 - DNA, 50 bp, Artificial Sequence
  Description of Artificial Sequence: Synthetic probe
caccccrcraaactcatatttttcccaaacrcraaaattaaaatcataac

SEQ ID NO: 1167 - DNA, 50 bp, Artificial Sequence
  Description of Artificial Sequence: Synthetic probe
cccacttaacrataaattacaataaaaaatacctccaaacccraacatcc

SEQ ID NO: 1168 - DNA, 50 bp, Artificial Sequence
  Description of Artificial Sequence: Synthetic probe
tattataaactataacttaaccactttttaaaattaaatttatcattaac

SEQ ID NO: 1169 - DNA, 50 bp, Artificial Sequence
  Description of Artificial Sequence: Synthetic probe
caatcracraaaaataacaatactatccccaaccatacraaaaaaactcc

SEQ ID NO: 1170 - DNA, 50 bp, Artificial Sequence
  Description of Artificial Sequence: Synthetic probe
ataacccrctattaatctacaaaaattccctcttcttatcraacccctac

SEQ ID NO: 1171 - DNA, 50 bp, Artificial Sequence
  Description of Artificial Sequence: Synthetic probe
caacctccraaaacraaacratttatcctactactaaaccctcccatatc

SEQ ID NO: 1172 - DNA, 50 bp, Artificial Sequence
  Description of Artificial Sequence: Synthetic probe
tttcattaaataaacratcraaaaaccraaccaaataactaaatttccrc

SEQ ID NO: 1173 - DNA, 50 bp, Artificial Sequence
  Description of Artificial Sequence: Synthetic probe
tttctaacttaaaatacaatactccrctctcacrttatctatcaactaac

SEQ ID NO: 1174 - DNA, 50 bp, Artificial Sequence
  Description of Artificial Sequence: Synthetic probe
aacctaaccttcraaccatataatatattaaatataaaactaactacaac

SEQ ID NO: 1175 - DNA, 50 bp, Artificial Sequence
  Description of Artificial Sequence: Synthetic probe
aaataaaaccaaaactaaaactactacaaaaaactctaacccraaactac

SEQ ID NO: 1176 - DNA, 50 bp, Artificial Sequence
  Description of Artificial Sequence: Synthetic probe
tcactctcactctacaatcatctaacaaaaatatttccaaaaaaacaacc

SEQ ID NO: 1177 - DNA, 50 bp, Artificial Sequence
  Description of Artificial Sequence: Synthetic probe
taatattaaaattaatatcctacttcttcctacactaacctaatcaatac

SEQ ID NO: 1178 - DNA, 50 bp, Artificial Sequence
  Description of Artificial Sequence: Synthetic probe
aatatatttactactttttcctctccccactaacctaaataaatcrctcc

SEQ ID NO: 1179 - DNA, 50 bp, Artificial Sequence
  Description of Artificial Sequence: Synthetic probe
cacacacaaaaaatataaaataacrttcactaaaataatactaaaccaac

SEQ ID NO: 1180 - DNA, 50 bp, Artificial Sequence
  Description of Artificial Sequence: Synthetic probe
aatcttcctaactttcraaatccrataccaaaaaataactataaaaatcc

SEQ ID NO: 1181 - DNA, 50 bp, Artificial Sequence
  Description of Artificial Sequence: Synthetic probe
ggtagttygggaatttagttagtaggatgaattttagtagaggaatttag

SEQ ID NO: 1182 - DNA, 50 bp, Artificial Sequence
  Description of Artificial Sequence: Synthetic probe
ctatccaatctctatatcactaaccctacaaaaaacaaccattaaaaacc

SEQ ID NO: 1183 - DNA, 50 bp, Artificial Sequence
  Description of Artificial Sequence: Synthetic probe
aaaaaacacaaattaattatttaatctcttactctcctctacctttatca

SEQ ID NO: 1184 - DNA, 50 bp, Artificial Sequence
  Description of Artificial Sequence: Synthetic probe
aaaatcataacraattaaaaaaactaataccccactcaaaatcccacrcc

SEQ ID NO: 1185 - DNA, 50 bp, Artificial Sequence
  Description of Artificial Sequence: Synthetic probe
tcccaaacaatcrtaaacrccatatatttacrcractaaaacaaacraac

SEQ ID NO: 1186 - DNA, 50 bp, Artificial Sequence
  Description of Artificial Sequence: Synthetic probe
aaaaaaacccaaaaaaacaaataactaaaatactaacrtccaaataaccc

SEQ ID NO: 1187 - DNA, 50 bp, Artificial Sequence
  Description of Artificial Sequence: Synthetic probe
ccaaaaattctaaactccattactaaccraatcttaattctttaaaccac

SEQ ID NO: 1188 - DNA, 50 bp, Artificial Sequence
  Description of Artificial Sequence: Synthetic probe
ccttttatacttctaatttaaaaaatttctatatttcaaaatctataatc

SEQ ID NO: 1189 - DNA, 50 bp, Artificial Sequence
  Description of Artificial Sequence: Synthetic probe
atcaccrtctaaccraacaatttctaaaacactaatatcttctcttcctc

SEQ ID NO: 1190 - DNA, 50 bp, Artificial Sequence
  Description of Artificial Sequence: Synthetic probe
ccctttaacccaaaactactttaaatacaccaattactataaaacractc

SEQ ID NO: 1191 - DNA, 50 bp, Artificial Sequence
  Description of Artificial Sequence: Synthetic probe
aaatattccattacccctcctatcctaaatctatattacraaaaacrctc

SEQ ID NO: 1192 - DNA, 50 bp, Artificial Sequence
  Description of Artificial Sequence: Synthetic probe
aataaaatataaaatcctactccaaaatccaactataaaaataattaacc

SEQ ID NO: 1193 - DNA, 50 bp, Artificial Sequence
  Description of Artificial Sequence: Synthetic probe
aaaacaaatttcaccatattaaccaaaataatctcaatctcctaacctca

SEQ ID NO: 1194 - DNA, 50 bp, Artificial Sequence
  Description of Artificial Sequence: Synthetic probe
atataaactaatacactaacaacctcctccttacctttaacattcaaaac

SEQ ID NO: 1195 - DNA, 50 bp, Artificial Sequence
  Description of Artificial Sequence: Synthetic probe
gtagagtatgttattaattattatyggatgttgtgtgtagttttggagtt

SEQ ID NO: 1196 - DNA, 50 bp, Artificial Sequence
  Description of Artificial Sequence: Synthetic probe
caaaatatatcaccaaccattatcraatactatatacaatcttaaaaccc

SEQ ID NO: 1197 - DNA, 50 bp, Artificial Sequence
  Description of Artificial Sequence: Synthetic probe
cctttaaatattaaaattcctcaaaactatactaatatcrttaaaaaacc

SEQ ID NO: 1198 - DNA, 50 bp, Artificial Sequence
  Description of Artificial Sequence: Synthetic probe
ttcrctttcacttcctcctccraaaacraacaaatctctaaatactaaac

SEQ ID NO: 1199 - DNA, 50 bp, Artificial Sequence
  Description of Artificial Sequence: Synthetic probe
ctcttctacctaataactaacaccttaaaaataaaatttataacrtcatc

SEQ ID NO: 1200 - DNA, 50 bp, Artificial Sequence
  Description of Artificial Sequence: Synthetic probe
craaacaaattcctcaaaaccactcratcaatctatacrttaaccttaac

SEQ ID NO: 1201 - DNA, 50 bp, Artificial Sequence
  Description of Artificial Sequence: Synthetic probe
ccccratatacrataaaaacrcracaaaaaaaataacccaatcttcraac

SEQ ID NO: 1202 - DNA, 50 bp, Artificial Sequence
  Description of Artificial Sequence: Synthetic probe
ccacrattaataaaaatataacraacrtaaatcaatccataaaacatctc

SEQ ID NO: 1203 - DNA, 50 bp, Artificial Sequence
  Description of Artificial Sequence: Synthetic probe
gaagaattggaagataattttaattagagtgatttgattgagtaggtagt

SEQ ID NO: 1204 - DNA, 50 bp, Artificial Sequence
  Description of Artificial Sequence: Synthetic probe
aaaaactaaaaaacaaccccaaccaaaataacctaattaaacaaacaacc

SEQ ID NO: 1205 - DNA, 50 bp, Artificial Sequence
  Description of Artificial Sequence: Synthetic probe
crcactacaaactcraaaaaaacractaaaacrctctatcractataaac

SEQ ID NO: 1206 - DNA, 50 bp, Artificial Sequence
  Description of Artificial Sequence: Synthetic probe
agagttttggaaataggttttgggttaattgtaatagaatatattygtyg

SEQ ID NO: 1207 - DNA, 50 bp, Artificial Sequence
  Description of Artificial Sequence: Synthetic probe
aaatcttaaaaacaaatcctaaaccaactacaacaaaatatacccrccrc

SEQ ID NO: 1208 - DNA, 50 bp, Artificial Sequence
  Description of Artificial Sequence: Synthetic probe
accatttaaaaaattcraaaactacctccctctaccctcacccaatactc

SEQ ID NO: 1209 - DNA, 50 bp, Artificial Sequence
  Description of Artificial Sequence: Synthetic probe
ttggttatggtttaagtgtttagtgaatatttattagaagtgtgattgta

SEQ ID NO: 1210 - DNA, 50 bp, Artificial Sequence
  Description of Artificial Sequence: Synthetic probe
ataaaacccaacaaaataaaacttttatatattacttaatccaacctccc

SEQ ID NO: 1211 - DNA, 50 bp, Artificial Sequence
  Description of Artificial Sequence: Synthetic probe
ataataactccacaattaataccacaacccatataaccaatcaatcccrc

SEQ ID NO: 1212 - DNA, 50 bp, Artificial Sequence
  Description of Artificial Sequence: Synthetic probe
ccaaaaacaaattaaattctctctttaatcctcatatccccatctatccc

SEQ ID NO: 1213 - DNA, 50 bp, Artificial Sequence
  Description of Artificial Sequence: Synthetic probe
aaaaatctaataaaaacattcccaccctcraaactccaaaatctcccttc

SEQ ID NO: 1214 - DNA, 50 bp, Artificial Sequence
  Description of Artificial Sequence: Synthetic probe
aaaataatataaaccaaaaaataatctctaaaaaatcaccaacaccaaac

SEQ ID NO: 1215 - DNA, 50 bp, Artificial Sequence
  Description of Artificial Sequence: Synthetic probe
ractctaaaaaccctatacrtcracttctaaactacctaaactcraaaac

SEQ ID NO: 1216 - DNA, 50 bp, Artificial Sequence
  Description of Artificial Sequence: Synthetic probe
atttgtatggaggggtttttagagtttttaattagtgttagtatatttag

SEQ ID NO: 1217 - DNA, 50 bp, Artificial Sequence
  Description of Artificial Sequence: Synthetic probe
cctacataaaaaaatccccaaaacccccaaccaataccaacatactcaac

SEQ ID NO: 1218 - DNA, 50 bp, Artificial Sequence
  Description of Artificial Sequence: Synthetic probe
aaccattaaaactcaaatatcataaataattattacaaaattccttaacc

SEQ ID NO: 1219 - DNA, 50 bp, Artificial Sequence
  Description of Artificial Sequence: Synthetic probe
taactacaaaatactcttttcccaataccaaaaacaatacttttatatcc

SEQ ID NO: 1220 - DNA, 50 bp, Artificial Sequence
  Description of Artificial Sequence: Synthetic probe
aacactaaacttataaaaaaaactcaaaaaaacatttccaaacaacttac

SEQ ID NO: 1221 - DNA, 50 bp, Artificial Sequence
  Description of Artificial Sequence: Synthetic probe
ccatcrccaaataaacttttaaaaacrcctattcctttctcrctttcttc

SEQ ID NO: 1222 - DNA, 50 bp, Artificial Sequence
  Description of Artificial Sequence: Synthetic probe
raaacaataattccraatccaacctaaaacrcratctaaaatcttaactc

SEQ ID NO: 1223 - DNA, 50 bp, Artificial Sequence
  Description of Artificial Sequence: Synthetic probe
aactcatttctctactcacctatctccraatccrtcrtaatatttcaaac

SEQ ID NO: 1224 - DNA, 50 bp, Artificial Sequence
  Description of Artificial Sequence: Synthetic probe
tccaaaaccacrttccaaaatcraatttaataaattcctcaatccctacc

SEQ ID NO: 1225 - DNA, 50 bp, Artificial Sequence
  Description of Artificial Sequence: Synthetic probe
aacttctaaaaaatctatactacccrctaaaaccaatcataaaccraaac

SEQ ID NO: 1226 - DNA, 50 bp, Artificial Sequence
  Description of Artificial Sequence: Synthetic probe
accatattattaataaccttacctatccaaacractactcaaaaattccc

SEQ ID NO: 1227 - DNA, 50 bp, Artificial Sequence
  Description of Artificial Sequence: Synthetic probe
raaaccraaaaacccraacraaacttacaacaatccaaaaaaccaacacc

SEQ ID NO: 1228 - DNA, 50 bp, Artificial Sequence
  Description of Artificial Sequence: Synthetic probe
ctactaacccaaatactaaacacttcactacccaaaactaaaaacctacc

SEQ ID NO: 1229 - DNA, 50 bp, Artificial Sequence
  Description of Artificial Sequence: Synthetic probe
taacccaaatactaaacacttcactacccaaaactaaaaacctaccracc

SEQ ID NO: 1230 - DNA, 50 bp, Artificial Sequence
  Description of Artificial Sequence: Synthetic probe
aataaaaccccaaaaaccccaactaaaacccrtactcaaaatcctaaacc

SEQ ID NO: 1231 - DNA, 50 bp, Artificial Sequence
  Description of Artificial Sequence: Synthetic probe
agatgggattttaagaattttaattaggattygtatttagggttttgagt

SEQ ID NO: 1232 - DNA, 50 bp, Artificial Sequence
  Description of Artificial Sequence: Synthetic probe
atatattcraaaatttaatatacaattaaaaattaacaaatctaacaccc

SEQ ID NO: 1233 - DNA, 50 bp, Artificial Sequence
  Description of Artificial Sequence: Synthetic probe
tataagtttgtttgaagttaagttaaagtaatggatagaagayggtagyg

SEQ ID NO: 1234 - DNA, 50 bp, Artificial Sequence
  Description of Artificial Sequence: Synthetic probe
ctttctatctcrctcactctctcacttcctaactaaaaattcccactaac

SEQ ID NO: 1235 - DNA, 50 bp, Artificial Sequence
  Description of Artificial Sequence: Synthetic probe
aaaaaattttaaacctccaaccttaaaacaaatcccctctcactcaatac

SEQ ID NO: 1236 - DNA, 50 bp, Artificial Sequence
  Description of Artificial Sequence: Synthetic probe
aactcaataaaactacacaaaaacacctcctcccraaactcaattcctcc

SEQ ID NO: 1237 - DNA, 50 bp, Artificial Sequence
  Description of Artificial Sequence: Synthetic probe
tacaaaaactctcrctaaaaccaatcccaaactccacaaaatcaaatcac

SEQ ID NO: 1238 - DNA, 50 bp, Artificial Sequence
  Description of Artificial Sequence: Synthetic probe
gtatagaggttttygttgaaattagttttaggttttatagagttagatta

SEQ ID NO: 1239 - DNA, 50 bp, Artificial Sequence
  Description of Artificial Sequence: Synthetic probe
ccccaaactaaaccttacaatacctataactaactatactaattaaaccc

SEQ ID NO: 1240 - DNA, 50 bp, Artificial Sequence
  Description of Artificial Sequence: Synthetic probe
cccraaatccacacctctcactccaacctaaactttaatactataaacac

SEQ ID NO: 1241 - DNA, 50 bp, Artificial Sequence
  Description of Artificial Sequence: Synthetic probe
gttttttgttagattgagtaggtgggagttataaatttttggttttgagg

SEQ ID NO: 1242 - DNA, 50 bp, Artificial Sequence
  Description of Artificial Sequence: Synthetic probe
aatatatattttgattggttttttgtagatagaagtattgtgagttatgt

SEQ ID NO: 1243 - DNA, 50 bp, Artificial Sequence
  Description of Artificial Sequence: Synthetic probe
acatatactttaactaacctcttacaaacaaaaatactataaatcatacc

SEQ ID NO: 1244 - DNA, 50 bp, Artificial Sequence
  Description of Artificial Sequence: Synthetic probe
gggtgagttattgtatygtattttaggttagataatagaggatatgttta

SEQ ID NO: 1245 - DNA, 50 bp, Artificial Sequence
  Description of Artificial Sequence: Synthetic probe
aaaaataacttaaaaaaaattaaaacctaaaatacctccttaaaataccc

SEQ ID NO: 1246 - DNA, 50 bp, Artificial Sequence
  Description of Artificial Sequence: Synthetic probe
tcaaatttcaaaaataaatcaaaaaaatcaactaccaaaacaattcaaac

SEQ ID NO: 1247 - DNA, 50 bp, Artificial Sequence
  Description of Artificial Sequence: Synthetic probe
tacccaaaaaaaacctaacctcaaactaccaacctcaaaaaaataaatac

SEQ ID NO: 1248 - DNA, 50 bp, Artificial Sequence
  Description of Artificial Sequence: Synthetic probe
ctatattttaaaaacccactttaactacaataaaaccaaattatcrtctc

SEQ ID NO: 1249 - DNA, 50 bp, Artificial Sequence
  Description of Artificial Sequence: Synthetic probe
tttttgggtgatgggaaaatgaaaaaaataatgtaaagtttgaattattg

SEQ ID NO: 1250 - DNA, 50 bp, Artificial Sequence
  Description of Artificial Sequence: Synthetic probe
tttatgttttaagggtttattttggttgtagtggagttagattatygttt

SEQ ID NO: 1251 - DNA, 50 bp, Artificial Sequence
  Description of Artificial Sequence: Synthetic probe
aacctatcctacaatataaacaatataaaaacaaaaacctccccaccccc

SEQ ID NO: 1252 - DNA, 50 bp, Artificial Sequence
  Description of Artificial Sequence: Synthetic probe
caaaatcaaatcacracttcacaccaatcrttctaatcacttaaacrttc

SEQ ID NO: 1253 - DNA, 50 bp, Artificial Sequence
  Description of Artificial Sequence: Synthetic probe
ctccttacaatataaaaacatcattaaacaatactaaataaaaactaaac

SEQ ID NO: 1254 - DNA, 50 bp, Artificial Sequence
  Description of Artificial Sequence: Synthetic probe
tgatttgttaaaggttagaagttaggtggtygtttttttgtttagattta

SEQ ID NO: 1255 - DNA, 50 bp, Artificial Sequence
  Description of Artificial Sequence: Synthetic probe
aatttatcaaaaatcaaaaattaaataaccrctctcctactcaaacttac

SEQ ID NO: 1256 - DNA, 50 bp, Artificial Sequence
  Description of Artificial Sequence: Synthetic probe
ttagttgatagataaygtgagagyggagtattgtattttaagttagaaaa

SEQ ID NO: 1257 - DNA, 50 bp, Artificial Sequence
  Description of Artificial Sequence: Synthetic probe
caaaatataaacrcaacaaaaaacraatatattaaacccccrcccatccc

SEQ ID NO: 1258 - DNA, 50 bp, Artificial Sequence
  Description of Artificial Sequence: Synthetic probe
taaacctaacrttaaatatatccccacccactatccaaaactaaactaac

SEQ ID NO: 1259 - DNA, 50 bp, Artificial Sequence
  Description of Artificial Sequence: Synthetic probe
aaaccctacctaaacatttcccttaatcttattatcctcctcaaaaaaac

SEQ ID NO: 1260 - DNA, 50 bp, Artificial Sequence
  Description of Artificial Sequence: Synthetic probe
acaaacaaacccaaaaaattcccrtaacrtctaccaataaaataaatacc

SEQ ID NO: 1261 - DNA, 50 bp, Artificial Sequence
  Description of Artificial Sequence: Synthetic probe
tggagaagttgtggttgttttattttatatagttatagtttggttagatt

SEQ ID NO: 1262 - DNA, 50 bp, Artificial Sequence
  Description of Artificial Sequence: Synthetic probe
aaaaaaactataattactccatcccacataatcataacctaaccaaaccc

SEQ ID NO: 1263 - DNA, 50 bp, Artificial Sequence
  Description of Artificial Sequence: Synthetic probe
aataaaaacatataaaaaaaataacaacaccctcctccctcraaacaaac

SEQ ID NO: 1264 - DNA, 50 bp, Artificial Sequence
  Description of Artificial Sequence: Synthetic probe
tcaactccttcatactaataaaaaattattatattcattccttaaatctc

SEQ ID NO: 1265 - DNA, 50 bp, Artificial Sequence
  Description of Artificial Sequence: Synthetic probe
tacttataaccactcttacctcctacttataaactactcataacaaaaac

SEQ ID NO: 1266 - DNA, 50 bp, Artificial Sequence
  Description of Artificial Sequence: Synthetic probe
ttttgaattaattgatttttagggaggggtggaaattggtttatatgttt

SEQ ID NO: 1267 - DNA, 50 bp, Artificial Sequence
  Description of Artificial Sequence: Synthetic probe
cctccaccctaaaaacatccactcrcaacaaattaaaaatcataatatac

SEQ ID NO: 1268 - DNA, 50 bp, Artificial Sequence
  Description of Artificial Sequence: Synthetic probe
ccccaaaataaacaaaaacacacttacccaatatattaccctccattccc

SEQ ID NO: 1269 - DNA, 50 bp, Artificial Sequence
  Description of Artificial Sequence: Synthetic probe
aaaaaaaacaattacaatcctccctaactctaaaatatcatttaaaaatc

SEQ ID NO: 1270 - DNA, 50 bp, Artificial Sequence
  Description of Artificial Sequence: Synthetic probe
aataaatacaaaatactaaaataaaaaacccaaattcccatatcctccac

SEQ ID NO: 1271 - DNA, 50 bp, Artificial Sequence
  Description of Artificial Sequence: Synthetic probe
atttttatgagttattggtatgagtaagttgggaagtattaaggttatag

SEQ ID NO: 1272 - DNA, 50 bp, Artificial Sequence
  Description of Artificial Sequence: Synthetic probe
aaacaaaacttaacacrccaattaataaaaacrccaaccaataaaataac

SEQ ID NO: 1273 - DNA, 50 bp, Artificial Sequence
  Description of Artificial Sequence: Synthetic probe
aacaaaacttaacacaccaattaataaaaacaccaaccaataaaataaca

SEQ ID NO: 1274 - DNA, 50 bp, Artificial Sequence
  Description of Artificial Sequence: Synthetic probe
tactaacacttttaaaattcttctcaataatttcaacaaatctaattaac

SEQ ID NO: 1275 - DNA, 50 bp, Artificial Sequence
  Description of Artificial Sequence: Synthetic probe
actaacacttttaaaattcttctcaataatttcaacaaatctaattaaca

SEQ ID NO: 1276 - DNA, 50 bp, Artificial Sequence
  Description of Artificial Sequence: Synthetic probe
tgggtagaatttggtaygttaattgatggagaygttagttaatgagatga

SEQ ID NO: 1277 - DNA, 50 bp, Artificial Sequence
  Description of Artificial Sequence: Synthetic probe
ttaaaaaacaaacaataaaatcattcctcaatataaccaaaaaatctaac

SEQ ID NO: 1278 - DNA, 50 bp, Artificial Sequence
  Description of Artificial Sequence: Synthetic probe
taaaaaacaaacaataaaatcattcctcaatataaccaaaaaatctaaca

SEQ ID NO: 1279 - DNA, 50 bp, Artificial Sequence
  Description of Artificial Sequence: Synthetic probe
gtttgtattggggttgtttttgtagtgaatttttaagaagattgggggtt

SEQ ID NO: 1280 - DNA, 50 bp, Artificial Sequence
  Description of Artificial Sequence: Synthetic probe
tttgtattggggttgtttttgtagtgaatttttaagaagattgggggttt

SEQ ID NO: 1281 - DNA, 50 bp, Artificial Sequence
  Description of Artificial Sequence: Synthetic probe
attgaggaataggtaatgggattattttttagtgtggttaaaggatttga

SEQ ID NO: 1282 - DNA, 50 bp, Artificial Sequence
  Description of Artificial Sequence: Synthetic probe
ttgaggaataggtaatgggattattttttagtgtggttaaaggatttgat

SEQ ID NO: 1283 - DNA, 50 bp, Artificial Sequence
  Description of Artificial Sequence: Synthetic probe
atttattcaccatctctacaatttaaatatacaaatattattcctacctc

SEQ ID NO: 1284 - DNA, 50 bp, Artificial Sequence
  Description of Artificial Sequence: Synthetic probe
ctcractataaaaccctaataaaaaatctacrcccratcaccataacrac

SEQ ID NO: 1285 - DNA, 50 bp, Artificial Sequence
  Description of Artificial Sequence: Synthetic probe
catacaaactcaattcccacrttttactaacattctaaacattcrccrac

SEQ ID NO: 1286 - DNA, 50 bp, Artificial Sequence
  Description of Artificial Sequence: Synthetic probe
ataaatacttcttctctaaatatctaaacccaacctaactctaaactctc

SEQ ID NO: 1287 - DNA, 50 bp, Artificial Sequence
  Description of Artificial Sequence: Synthetic probe
ataaactattaataattcaccctctacccaaaactaacaataaacccacc

SEQ ID NO: 1288 - DNA, 50 bp, Artificial Sequence
  Description of Artificial Sequence: Synthetic probe
ttataacccaatatctaacctataattaaatatctttaaacctataaatc

SEQ ID NO: 1289 - DNA, 50 bp, Artificial Sequence
  Description of Artificial Sequence: Synthetic probe
aaacraatccctaatctcttttaactatcctaaaaaccccaatcccatcc

SEQ ID NO: 1290 - DNA, 50 bp, Artificial Sequence
  Description of Artificial Sequence: Synthetic probe
aaaattaaaattttataccccaaaacataaatttcaaccactaaaatccc

SEQ ID NO: 1291 - DNA, 50 bp, Artificial Sequence
  Description of Artificial Sequence: Synthetic probe
ccctacttccctatcctctccttcaatccrtaaccaatccttatataaac

SEQ ID NO: 1292 - DNA, 50 bp, Artificial Sequence
  Description of Artificial Sequence: Synthetic probe
aaacacaacctccaaattcaaacaattacccactctccctcaaaaatacc

SEQ ID NO: 1293 - DNA, 50 bp, Artificial Sequence
  Description of Artificial Sequence: Synthetic probe
gagttatttttgaaattygtgtagaattgtggtttgtgtggtttatgtta

SEQ ID NO: 1294 - DNA, 50 bp, Artificial Sequence
  Description of Artificial Sequence: Synthetic probe
aataaatataataaaacctccttaccaaaccraatttctctaattaaaac

SEQ ID NO: 1295 - DNA, 50 bp, Artificial Sequence
  Description of Artificial Sequence: Synthetic probe
ccacractcttctaatatcaattactaatttcctacaacatctactcctc

SEQ ID NO: 1296 - DNA, 50 bp, Artificial Sequence
  Description of Artificial Sequence: Synthetic probe
agggtaggttttgaagttgtataatttatataggttaygttgtttttagg

SEQ ID NO: 1297 - DNA, 50 bp, Artificial Sequence
  Description of Artificial Sequence: Synthetic probe
aaacaaactttaaaattacataatttacacaaaccacrctatccccaaac

SEQ ID NO: 1298 - DNA, 50 bp, Artificial Sequence
  Description of Artificial Sequence: Synthetic probe
caaccraaaaaaactctaaacctcrcrctaaattccaaacaaataacccc

SEQ ID NO: 1299 - DNA, 50 bp, Artificial Sequence
  Description of Artificial Sequence: Synthetic probe
taatactcaaattaccccatctttaaccaataaaaacctcctaaccraac

SEQ ID NO: 1300 - DNA, 50 bp, Artificial Sequence
  Description of Artificial Sequence: Synthetic probe
tattctctaccttcatctcccctcactattcccataaaaaccttttaaac

SEQ ID NO: 1301 - DNA, 50 bp, Artificial Sequence
  Description of Artificial Sequence: Synthetic probe
aaaataaccttataacctcraaacttaaaactatcraccacaataatcac

SEQ ID NO: 1302 - DNA, 50 bp, Artificial Sequence
  Description of Artificial Sequence: Synthetic probe
aaataaccttataacctcaaaacttaaaactatcaaccacaataatcaca

SEQ ID NO: 1303 - DNA, 50 bp, Artificial Sequence
  Description of Artificial Sequence: Synthetic probe
taagatgattttgtggtttygaaatttgaggttgtyggttataatggtta

SEQ ID NO: 1304 - DNA, 50 bp, Artificial Sequence
  Description of Artificial Sequence: Synthetic probe
aaatttctccatattaatcaacctaattctctaaaaacacttaaccaaca

SEQ ID NO: 1305 - DNA, 50 bp, Artificial Sequence
  Description of Artificial Sequence: Synthetic probe
aatcccaaccctttaaaaaaccaaacaaataaatcacttaaaatcaaaca

SEQ ID NO: 1306 - DNA, 50 bp, Artificial Sequence
  Description of Artificial Sequence: Synthetic probe
caacaaaatcaacctaaaaaccatctaaacracracrtcaacraacctac

SEQ ID NO: 1307 - DNA, 50 bp, Artificial Sequence
  Description of Artificial Sequence: Synthetic probe
atctcctacttccaaattactatcrcttctacctctaaacccattaaacc

SEQ ID NO: 1308 - DNA, 50 bp, Artificial Sequence
  Description of Artificial Sequence: Synthetic probe
aaaaacttaaataaccttatctcaattaaaatctaatttaataaccaaac

SEQ ID NO: 1309 - DNA, 50 bp, Artificial Sequence
  Description of Artificial Sequence: Synthetic probe
aacaactctacaccccttacttacaattctaaacattctataacaaactc

SEQ ID NO: 1310 - DNA, 50 bp, Artificial Sequence
  Description of Artificial Sequence: Synthetic probe
atttttttttctatccctataaccatacactactcaattctaacaacttc

SEQ ID NO: 1311 - DNA, 50 bp, Artificial Sequence
  Description of Artificial Sequence: Synthetic probe
acaaattaaaaaataacaataaatccctcaattttctactaaactcatac

SEQ ID NO: 1312 - DNA, 50 bp, Artificial Sequence
  Description of Artificial Sequence: Synthetic probe
ataaaaattaataaaactccataaaactattatccaaaaatcctacrtcc

SEQ ID NO: 1313 - DNA, 50 bp, Artificial Sequence
  Description of Artificial Sequence: Synthetic probe
aaaaaaaaacaaataaaaaactatcaatcaccaaccatcacaaaacccac

SEQ ID NO: 1314 - DNA, 50 bp, Artificial Sequence
  Description of Artificial Sequence: Synthetic probe
caaaaaaacacaaaatctaacaaatatcccctataatcaaaactaactcc

SEQ ID NO: 1315 - DNA, 50 bp, Artificial Sequence
  Description of Artificial Sequence: Synthetic probe
tatttcatctctctctcaaataccaaacaatactattttaatccttctac

SEQ ID NO: 1316 - DNA, 50 bp, Artificial Sequence
  Description of Artificial Sequence: Synthetic probe
atctatataactatataattattcrctcctaacctctccaatatataaac

SEQ ID NO: 1317 - DNA, 50 bp, Artificial Sequence
  Description of Artificial Sequence: Synthetic probe
aaactcccraaaaaattaaacttataaaaatattctaaaaaaactcctac

SEQ ID NO: 1318 - DNA, 50 bp, Artificial Sequence
  Description of Artificial Sequence: Synthetic probe
taattccccttaaaaaacatacaacaaatatacracttaccaattaaatc

SEQ ID NO: 1319 - DNA, 50 bp, Artificial Sequence
  Description of Artificial Sequence: Synthetic probe
cratacatctatatactccccctccccrtaaaaaatttaaactacaaaac

SEQ ID NO: 1320 - DNA, 50 bp, Artificial Sequence
  Description of Artificial Sequence: Synthetic probe
aaaaaaatactaattaaacacttaactttccctataattaccaatcccac

SEQ ID NO: 1321 - DNA, 50 bp, Artificial Sequence
  Description of Artificial Sequence: Synthetic probe
aaaaacaaaaaacccrataacaaaactcctccacaccctaaacctaaacc

SEQ ID NO: 1322 - DNA, 50 bp, Artificial Sequence
  Description of Artificial Sequence: Synthetic probe
tataccctatctcaattaaatcaaaatatttaacrtcaatattttttaac

SEQ ID NO: 1323 - DNA, 50 bp, Artificial Sequence
  Description of Artificial Sequence: Synthetic probe
tttaaaccaacaattcccaaactactacacaataaaaatacccaaaaatc

SEQ ID NO: 1324 - DNA, 50 bp, Artificial Sequence
  Description of Artificial Sequence: Synthetic probe
taattttctacrtaaaacraaaaaccrctataatatccraatactaaaac

SEQ ID NO: 1325 - DNA, 50 bp, Artificial Sequence
  Description of Artificial Sequence: Synthetic probe
atatttttgagaaattgaaaygataggggaaaggaggttttattgagtat

SEQ ID NO: 1326 - DNA, 50 bp, Artificial Sequence
  Description of Artificial Sequence: Synthetic probe
caaaacaaaaaatttccccrcttccracrtaacccaaaaaatcaaaaccc

SEQ ID NO: 1327 - DNA, 50 bp, Artificial Sequence
  Description of Artificial Sequence: Synthetic probe
ctcctcractataaaaccctaataaaaaatctacrcccratcaccataac

SEQ ID NO: 1328 - DNA, 50 bp, Artificial Sequence
  Description of Artificial Sequence: Synthetic probe
ttaccaatctaaatccrtcctaataccttactatacatacaattctactc

SEQ ID NO: 1329 - DNA, 50 bp, Artificial Sequence
  Description of Artificial Sequence: Synthetic probe
ctaccccttcctcaatcttttacaaattaaataacctcctcacctaaaac

SEQ ID NO: 1330 - DNA, 50 bp, Artificial Sequence
  Description of Artificial Sequence: Synthetic probe
taacccatttctaatatttatctctccttcaaaaaaattaatatataaac

SEQ ID NO: 1331 - DNA, 50 bp, Artificial Sequence
  Description of Artificial Sequence: Synthetic probe
caaactaaaccrctccccrctttaatctcccaataaaacttaaacctacc

SEQ ID NO: 1332 - DNA, 50 bp, Artificial Sequence
  Description of Artificial Sequence: Synthetic probe
actaatccraaaccraaaaaacraatccaatcrcaacaaactactaaaac

SEQ ID NO: 1333 - DNA, 50 bp, Artificial Sequence
  Description of Artificial Sequence: Synthetic probe
aatacaaatttacctccctaactactaaaatatatatttacctcttaatc

SEQ ID NO: 1334 - DNA, 50 bp, Artificial Sequence
  Description of Artificial Sequence: Synthetic probe
aacactacractcaaaaccccaaaaataaatacctattatacraaatctc

SEQ ID NO: 1335 - DNA, 50 bp, Artificial Sequence
  Description of Artificial Sequence: Synthetic probe
agatattgyggtttaaaattttaagggtaggtatttattgtgyggagttt

SEQ ID NO: 1336 - DNA, 50 bp, Artificial Sequence
  Description of Artificial Sequence: Synthetic probe
aaaaaatcaatataaaacatacaataaaaatttaactataacatcaacac

SEQ ID NO: 1337 - DNA, 50 bp, Artificial Sequence
  Description of Artificial Sequence: Synthetic probe
gttgaagttattggagttaatttggtagattggagtttgtatagaaaaag

SEQ ID NO: 1338 - DNA, 50 bp, Artificial Sequence
  Description of Artificial Sequence: Synthetic probe
ttttctaaaaatattttccaaaacaaaaacractatctccccaaacctac

SEQ ID NO: 1339 - DNA, 50 bp, Artificial Sequence
  Description of Artificial Sequence: Synthetic probe
agggtgatttgatataatttggtattaggatgattgtttttaatgagayg

SEQ ID NO: 1340 - DNA, 50 bp, Artificial Sequence
  Description of Artificial Sequence: Synthetic probe
tttttttggagatgttttttagagtagaaayggttgtttttttaggtttg

SEQ ID NO: 1341 - DNA, 50 bp, Artificial Sequence
  Description of Artificial Sequence: Synthetic probe
tatacactatattatacacataatcattaaaaaaatcccttattaaaacc

SEQ ID NO: 1342 - DNA, 50 bp, Artificial Sequence
  Description of Artificial Sequence: Synthetic probe
raatccaacctaaaacrcratctaaaatcttaactcrcttaaaacaccac

SEQ ID NO: 1343 - DNA, 50 bp, Artificial Sequence
  Description of Artificial Sequence: Synthetic probe
taataataattaaacaaaaaatcaattttattatctccataaaaaccaac

SEQ ID NO: 1344 - DNA, 50 bp, Artificial Sequence
  Description of Artificial Sequence: Synthetic probe
aaaaatttaaacrttctaaacccrccccraaaacaaataaaccaatcaac

SEQ ID NO: 1345 - DNA, 50 bp, Artificial Sequence
  Description of Artificial Sequence: Synthetic probe
caaaccacttttaaaaataaacrttatctaataaacaaacraccrctttc

SEQ ID NO: 1346 - DNA, 50 bp, Artificial Sequence
  Description of Artificial Sequence: Synthetic probe
catcraacccaaaaacaatcccaaaaaacrtaaaaacrctcacccctttc

SEQ ID NO: 1347 - DNA, 50 bp, Artificial Sequence
  Description of Artificial Sequence: Synthetic probe
ttctatcccactattattactcccaaaaattctaaaatcccaatactttc

SEQ ID NO: 1348 - DNA, 50 bp, Artificial Sequence
  Description of Artificial Sequence: Synthetic probe
atcactccattccaaacaaaccraaatacttaaataaccctaataacacc

SEQ ID NO: 1349 - DNA, 50 bp, Artificial Sequence
  Description of Artificial Sequence: Synthetic probe
aacaattcctacataatctaaaccaaaaacccacaacacttaatccccac

SEQ ID NO: 1350 - DNA, 50 bp, Artificial Sequence
  Description of Artificial Sequence: Synthetic probe
ctaaacraaactacaaccaaccccctaaaacrccaactttaaaaattctc

SEQ ID NO: 1351 - DNA, 50 bp, Artificial Sequence
  Description of Artificial Sequence: Synthetic probe
aaaatccataaaaactaaacacaataactttttaaaaaattctataaacc

SEQ ID NO: 1352 - DNA, 50 bp, Artificial Sequence
  Description of Artificial Sequence: Synthetic probe
aattacctataaaataaatctccraaacraccttaaaaaccccaacaatc

SEQ ID NO: 1353 - DNA, 50 bp, Artificial Sequence
  Description of Artificial Sequence: Synthetic probe
aaattccaactactcaacctcccraaactaaataaaatcacttaaaaatc

SEQ ID NO: 1354 - DNA, 50 bp, Artificial Sequence
  Description of Artificial Sequence: Synthetic probe
craaactaaataaaatcacttaaaaatcractattaaaacctccaaaatc

SEQ ID NO: 1355 - DNA, 50 bp, Artificial Sequence
  Description of Artificial Sequence: Synthetic probe
tataaaaatttagygatttatttgattgtttatgaggtgagttttygagg

SEQ ID NO: 1356 - DNA, 50 bp, Artificial Sequence
  Description of Artificial Sequence: Synthetic probe
ctaaataaaatcacttaaaaatcractattaaaacctccaaaatcrcctc

SEQ ID NO: 1357 - DNA, 50 bp, Artificial Sequence
  Description of Artificial Sequence: Synthetic probe
cacacacaaaaacccaacratccatttaattacctataaaataaatctcc

SEQ ID NO: 1358 - DNA, 50 bp, Artificial Sequence
  Description of Artificial Sequence: Synthetic probe
aacctccaaaatcrcctcraaaactcacctcataaacaatcaaataaatc

SEQ ID NO: 1359 - DNA, 50 bp, Artificial Sequence
  Description of Artificial Sequence: Synthetic probe
gggtttttaaggtygtttyggagatttattttataggtaattaaatggat

SEQ ID NO: 1360 - DNA, 50 bp, Artificial Sequence
  Description of Artificial Sequence: Synthetic probe
tattacaataacatttaaattacttataacatattcatcctaatcctttc

SEQ ID NO: 1361 - DNA, 50 bp, Artificial Sequence
  Description of Artificial Sequence: Synthetic probe
ctaaaaataccttcraataaattacctccccacataaaaaaacttaaacc

SEQ ID NO: 1362 - DNA, 50 bp, Artificial Sequence
  Description of Artificial Sequence: Synthetic probe
aactactttaatactaaacactatattaaatacaaactaaaaataccttc

SEQ ID NO: 1363 - DNA, 50 bp, Artificial Sequence
  Description of Artificial Sequence: Synthetic probe
aaaatatatatttcractcaaactttcttatataaaaaaataatccaccc

SEQ ID NO: 1364 - DNA, 50 bp, Artificial Sequence
  Description of Artificial Sequence: Synthetic probe
ataccaataaataataaccactaaaaaacctatcaataaataccaataac

SEQ ID NO: 1365 - DNA, 50 bp, Artificial Sequence
  Description of Artificial Sequence: Synthetic probe
ataaacracttatacccaataaaatataaccctctactaatttttaatac

SEQ ID NO: 1366 - DNA, 50 bp, Artificial Sequence
  Description of Artificial Sequence: Synthetic probe
caaacataccaaatataaaaataaaactcatctatatattccatttaaac

SEQ ID NO: 1367 - DNA, 50 bp, Artificial Sequence
  Description of Artificial Sequence: Synthetic probe
taaygaaattgtagtttaatttgtgaagagatgtgaatgtaattgagata

SEQ ID NO: 1368 - DNA, 50 bp, Artificial Sequence
  Description of Artificial Sequence: Synthetic probe
ttatttttatatctaacatacttaaatccataccraccctccaactactc

SEQ ID NO: 1369 - DNA, 50 bp, Artificial Sequence
  Description of Artificial Sequence: Synthetic probe
acaataccrctaataaaatcatacratccataacccctaaaaacaaaccc

SEQ ID NO: 1370 - DNA, 50 bp, Artificial Sequence
  Description of Artificial Sequence: Synthetic probe
aactactcraacctacccttaaaaactataaaccrcataactctatcaac

SEQ ID NO: 1371 - DNA, 50 bp, Artificial Sequence
  Description of Artificial Sequence: Synthetic probe
caaaaaacrcctaccraacccaatcaataatcraaaaacrcaaacaacac

SEQ ID NO: 1372 - DNA, 50 bp, Artificial Sequence
  Description of Artificial Sequence: Synthetic probe
aaaaaaacccccaaaaaacrcctaccraacccaatcaataatcraaaaac

SEQ ID NO: 1373 - DNA, 50 bp, Artificial Sequence
  Description of Artificial Sequence: Synthetic probe
ccttaaaattcraaaacrccctactaaaaaaccaaaaccccrcaaaaacc

SEQ ID NO: 1374 - DNA, 50 bp, Artificial Sequence
  Description of Artificial Sequence: Synthetic probe
aaattaacracaacraaaaaaaacacatccraacctcrcaaaaactaatc

SEQ ID NO: 1375 - DNA, 50 bp, Artificial Sequence
  Description of Artificial Sequence: Synthetic probe
aaaattttaaaaatttataaaaattcccctccrattcrcrttcccrcccc

SEQ ID NO: 1376 - DNA, 50 bp, Artificial Sequence
  Description of Artificial Sequence: Synthetic probe
aattaaaaattttaaaaatttataaaaattcccctccrattcrcrttccc

SEQ ID NO: 1377 - DNA, 50 bp, Artificial Sequence
  Description of Artificial Sequence: Synthetic probe
taccaaaccccraaaaatcaaaatcaaatcctataacaaataactatatc

SEQ ID NO: 1378 - DNA, 50 bp, Artificial Sequence
  Description of Artificial Sequence: Synthetic probe
atgttaggtttyggaggattagaattaagttttatagtaggtgattatat

SEQ ID NO: 1379 - DNA, 50 bp, Artificial Sequence
  Description of Artificial Sequence: Synthetic probe
cacacacacacratataatcacctactataaaacttaattctaatcctcc

SEQ ID NO: 1380 - DNA, 50 bp, Artificial Sequence
  Description of Artificial Sequence: Synthetic probe
cttaattatataaaactcttaaacaataccaccatacattatacataacc

SEQ ID NO: 1381 - DNA, 50 bp, Artificial Sequence
  Description of Artificial Sequence: Synthetic probe
tctaacaaaatcccacaactaaatattatcaaacaatttaaactacattc

SEQ ID NO: 1382 - DNA, 50 bp, Artificial Sequence
  Description of Artificial Sequence: Synthetic probe
aacaaacatacaaattttaacaactttaaactcataaacaaatataaaac

SEQ ID NO: 1383 - DNA, 50 bp, Artificial Sequence
  Description of Artificial Sequence: Synthetic probe
taaaaaaaacttaacaaatacaaaatctaacacaaaatatattctacaac

SEQ ID NO: 1384 - DNA, 50 bp, Artificial Sequence
  Description of Artificial Sequence: Synthetic probe
gttggtttagtagggattatagatatgtttatttagatatattgttttag

SEQ ID NO: 1385 - DNA, 50 bp, Artificial Sequence
  Description of Artificial Sequence: Synthetic probe
ctaattcaacaaaaactacaaacatatttatttaaatatactatttcaac

SEQ ID NO: 1386 - DNA, 50 bp, Artificial Sequence
  Description of Artificial Sequence: Synthetic probe
ttgagagaagtttaatagatgtagggtttagtatagggtgtgttttataa

SEQ ID NO: 1387 - DNA, 50 bp, Artificial Sequence
  Description of Artificial Sequence: Synthetic probe
cctaaaaataaaaatacaaatactaccttctaaaaaaatacaacaaaatc

SEQ ID NO: 1388 - DNA, 50 bp, Artificial Sequence
  Description of Artificial Sequence: Synthetic probe
atatacaaaatttccaactatttataaaatatcttcctatccataatacc

SEQ ID NO: 1389 - DNA, 50 bp, Artificial Sequence
  Description of Artificial Sequence: Synthetic probe
tttactaaaacactcttcttcctactcaaaaaaatatttcaacaaaaatc

SEQ ID NO: 1390 - DNA, 50 bp, Artificial Sequence
  Description of Artificial Sequence: Synthetic probe
aaaccattaccacttaatctaaaaccctttacaaatataaataatccccc

SEQ ID NO: 1391 - DNA, 50 bp, Artificial Sequence
  Description of Artificial Sequence: Synthetic probe
attttaaatttttaatacaactcccataaaaaatactttaaaataaaccc

SEQ ID NO: 1392 - DNA, 50 bp, Artificial Sequence
  Description of Artificial Sequence: Synthetic probe
aagtaggtttggggtatataatgtagttaaataygttagtatttttttag

SEQ ID NO: 1393 - DNA, 50 bp, Artificial Sequence
  Description of Artificial Sequence: Synthetic probe
aacaaatctaaaacacacaatataatcaaacacrttaatatttcctcaac

SEQ ID NO: 1394 - DNA, 50 bp, Artificial Sequence
  Description of Artificial Sequence: Synthetic probe
tttttccatttaataaatccaattatatatttcrctaaaaaaatactaac

SEQ ID NO: 1395 - DNA, 50 bp, Artificial Sequence
  Description of Artificial Sequence: Synthetic probe
tattacataatactctaaacaaatctaaaacacacaatataatcaaacac

SEQ ID NO: 1396 - DNA, 50 bp, Artificial Sequence
  Description of Artificial Sequence: Synthetic probe
aatatttcaaatacttttttctttatcacataaaatatacccaaatttac

SEQ ID NO: 1397 - DNA, 50 bp, Artificial Sequence
  Description of Artificial Sequence: Synthetic probe
aaacaaaatcaaaatacaccaaaaatccaaaattataaccccttatacac

SEQ ID NO: 1398 - DNA, 50 bp, Artificial Sequence
  Description of Artificial Sequence: Synthetic probe
tgtgataaagaaaaaagtatttgaaatattggaagtaygaatgatagagg

SEQ ID NO: 1399 - DNA, 50 bp, Artificial Sequence
  Description of Artificial Sequence: Synthetic probe
gattttttggaggattaaggttaggaaaatgatgtttattttttagttgt

SEQ ID NO: 1400 - DNA, 50 bp, Artificial Sequence
  Description of Artificial Sequence: Synthetic probe
accccttaaaaaatcaaaaccaaaaaaataatacttacctcccaactacc

SEQ ID NO: 1401 - DNA, 50 bp, Artificial Sequence
  Description of Artificial Sequence: Synthetic probe
aaaactaataatcrattttaaatcacataaatatcaaataacractaaac

SEQ ID NO: 1402 - DNA, 50 bp, Artificial Sequence
  Description of Artificial Sequence: Synthetic probe
gaaaattgataatyggttttgaattatatgagtattagatgaygattgga

SEQ ID NO: 1403 - DNA, 50 bp, Artificial Sequence
  Description of Artificial Sequence: Synthetic probe
ataccccatttctacttttatattttatcctttactctaaccrtccaatc

SEQ ID NO: 1404 - DNA, 50 bp, Artificial Sequence
  Description of Artificial Sequence: Synthetic probe
atttagtggaaaattgataatyggttttgaattatatgagtattagatga

SEQ ID NO: 1405 - DNA, 50 bp, Artificial Sequence
  Description of Artificial Sequence: Synthetic probe
cacaataatacaaatccaattccaacccaaccrataacaccccaaaatcc

SEQ ID NO: 1406 - DNA, 50 bp, Artificial Sequence
  Description of Artificial Sequence: Synthetic probe
acttaaaaaaacttcctacccraaccaaaactaaaatctcctactcaacc

SEQ ID NO: 1407 - DNA, 50 bp, Artificial Sequence
  Description of Artificial Sequence: Synthetic probe
tacaaaccaacaacraactatattaacracratatctaaaatcraaaacc

SEQ ID NO: 1408 - DNA, 50 bp, Artificial Sequence
  Description of Artificial Sequence: Synthetic probe
cacttatatttttaactattaaaataccctcttcacaatcctaaacttac

SEQ ID NO: 1409 - DNA, 50 bp, Artificial Sequence
  Description of Artificial Sequence: Synthetic probe
atcaaaaaatctactccaaacaaacactaataatcccrctccactacaac

SEQ ID NO: 1410 - DNA, 50 bp, Artificial Sequence
  Description of Artificial Sequence: Synthetic probe
ccaacrcacaaaatcaaataaaacttatacactaattaactataaaactc

SEQ ID NO: 1411 - DNA, 50 bp, Artificial Sequence
  Description of Artificial Sequence: Synthetic probe
acracracactcaataaataacrccaaataaccaatcacaaaccaacctc

SEQ ID NO: 1412 - DNA, 50 bp, Artificial Sequence
  Description of Artificial Sequence: Synthetic probe
tctctactactcacctttatatccttaactccttcrcataaaatccracc

SEQ ID NO: 1413 - DNA, 50 bp, Artificial Sequence
  Description of Artificial Sequence: Synthetic probe
caactcccaaaaaaaactacrctcrtccactaactcaaaaaccaataaac

SEQ ID NO: 1414 - DNA, 50 bp, Artificial Sequence
  Description of Artificial Sequence: Synthetic probe
aacctcatcraacctaaccctaattaatcrataccratcatataccaaac

SEQ ID NO: 1415 - DNA, 50 bp, Artificial Sequence
  Description of Artificial Sequence: Synthetic probe
ataatttttaaagaggattgygttygtttattggtttagaggttaatgga

SEQ ID NO: 1416 - DNA, 50 bp, Artificial Sequence
  Description of Artificial Sequence: Synthetic probe
aactacccrtccacttactctttttacrattctacaaacrtaacaaaaac

SEQ ID NO: 1417 - DNA, 50 bp, Artificial Sequence
  Description of Artificial Sequence: Synthetic probe
craccttattttatatattcttatataatcacaaaattttacaaacaatc

SEQ ID NO: 1418 - DNA, 50 bp, Artificial Sequence
  Description of Artificial Sequence: Synthetic probe
atcttttcattcttaaacattccatcatttcacaataatataataaacac

SEQ ID NO: 1419 - DNA, 50 bp, Artificial Sequence
  Description of Artificial Sequence: Synthetic probe
rttcaaaaaaatataatccttaccrtcrtacrcrtactaataatacccrc

SEQ ID NO: 1420 - DNA, 50 bp, Artificial Sequence
  Description of Artificial Sequence: Synthetic probe
crccctatacctataaatatttaaacaattcaatttaatacacrttcaac

SEQ ID NO: 1421 - DNA, 50 bp, Artificial Sequence
  Description of Artificial Sequence: Synthetic probe
aaatctaaaaacaaatctacaaatctaatcactaatctcattacaataac

SEQ ID NO: 1422 - DNA, 50 bp, Artificial Sequence
  Description of Artificial Sequence: Synthetic probe
gagatttggaaataggtttgtaaatttggttattggttttattgtagtaa

SEQ ID NO: 1423 - DNA, 50 bp, Artificial Sequence
  Description of Artificial Sequence: Synthetic probe
attcttaaaatcccatctccccatccctcacctataaatactacaaatac

SEQ ID NO: 1424 - DNA, 50 bp, Artificial Sequence
  Description of Artificial Sequence: Synthetic probe
tttatagttaattagtgtataagttttatttgattttgtgygttgggagg

SEQ ID NO: 1425 - DNA, 50 bp, Artificial Sequence
  Description of Artificial Sequence: Synthetic probe
ctacaaccaaccaatatacaaaccctacctaaccttatacrctaaaaaac

SEQ ID NO: 1426 - DNA, 50 bp, Artificial Sequence
  Description of Artificial Sequence: Synthetic probe
aaaaaaaacttttcraaaaccaacatccccttacttcactaaaacctccc

SEQ ID NO: 1427 - DNA, 50 bp, Artificial Sequence
  Description of Artificial Sequence: Synthetic probe
ctacraaaaaataaccaatcractaaaccrcctaaatactatactacaac

SEQ ID NO: 1428 - DNA, 50 bp, Artificial Sequence
  Description of Artificial Sequence: Synthetic probe
cttaacraaatttaccraaattatctacctatcccrctaaaataaaaacc

SEQ ID NO: 1429 - DNA, 50 bp, Artificial Sequence
  Description of Artificial Sequence: Synthetic probe
tactctcaactactcraaactaatccttaattttaactacrctcrcrcac

SEQ ID NO: 1430 - DNA, 50 bp, Artificial Sequence
  Description of Artificial Sequence: Synthetic probe
cacaacaatcccaatatatattaatctaacaaataaatccaaaaataaac

SEQ ID NO: 1431 - DNA, 50 bp, Artificial Sequence
  Description of Artificial Sequence: Synthetic probe
ttattggygtyggttgtttgttttttagtatattagtaaagttttaaggt

SEQ ID NO: 1432 - DNA, 50 bp, Artificial Sequence
  Description of Artificial Sequence: Synthetic probe
cactaacrtcractatttattcttcaacatattaataaaacttcaaaatc

SEQ ID NO: 1433 - DNA, 50 bp, Artificial Sequence
  Description of Artificial Sequence: Synthetic probe
tcacaataaaaccccttctctaacttcacattactaaaaatcataaattc

SEQ ID NO: 1434 - DNA, 50 bp, Artificial Sequence
  Description of Artificial Sequence: Synthetic probe
atattggttttatagaataaatgtgyggattgaattttgtttataggata

SEQ ID NO: 1435 - DNA, 50 bp, Artificial Sequence
  Description of Artificial Sequence: Synthetic probe
ratttaaaaaaatcctttactattaacctaatcaaccttctctattaccc

SEQ ID NO: 1436 - DNA, 50 bp, Artificial Sequence
  Description of Artificial Sequence: Synthetic probe
crtcraaaaacatactcaaaaaaacrtcctttaaaaccaaaataacttac

SEQ ID NO: 1437 - DNA, 50 bp, Artificial Sequence
  Description of Artificial Sequence: Synthetic probe
aaaaatttcccaaattataaataatttcactatatctttcttaccaaacc

SEQ ID NO: 1438 - DNA, 50 bp, Artificial Sequence
  Description of Artificial Sequence: Synthetic probe
aaaaactaaaaccaaaaaacatcacrcctaatcccttaaaatccaacrcc

SEQ ID NO: 1439 - DNA, 50 bp, Artificial Sequence
  Description of Artificial Sequence: Synthetic probe
atacaaacaacaaactcacccaatctaatacataccttcttaaacatcac

SEQ ID NO: 1440 - DNA, 50 bp, Artificial Sequence
  Description of Artificial Sequence: Synthetic probe
caaaataactttcraattctaattatctccaaaatcatccraccaatctc

SEQ ID NO: 1441 - DNA, 50 bp, Artificial Sequence
  Description of Artificial Sequence: Synthetic probe
caaataaacatcrtaaaatacacccttccacacatctctccactaaaacc

SEQ ID NO: 1442 - DNA, 50 bp, Artificial Sequence
  Description of Artificial Sequence: Synthetic probe
aagtttgtattattttgtaagtagtagtttagtttggtatttgtgtaagg

SEQ ID NO: 1443 - DNA, 50 bp, Artificial Sequence
  Description of Artificial Sequence: Synthetic probe
tattttggagaaattygaaattttgggagttgtgaaattattttaggttt

SEQ ID NO: 1444 - DNA, 50 bp, Artificial Sequence
  Description of Artificial Sequence: Synthetic probe
accctaaaaaaacccraaaccttaaaaactataaaatcattccaaatccc

SEQ ID NO: 1445 - DNA, 50 bp, Artificial Sequence
  Description of Artificial Sequence: Synthetic probe
ttaaccaaactaatctccaactcctaactacaaataatctaccaacctca

SEQ ID NO: 1446 - DNA, 50 bp, Artificial Sequence
  Description of Artificial Sequence: Synthetic probe
acaacaacrttataacrctctaaatttcraaacataaacctaaaccatac

SEQ ID NO: 1447 - DNA, 50 bp, Artificial Sequence
  Description of Artificial Sequence: Synthetic probe
aaaacttatcacacaaaaccaaaattataaatactctactaataaaattc

SEQ ID NO: 1448 - DNA, 50 bp, Artificial Sequence
  Description of Artificial Sequence: Synthetic probe
aagggtttattatataagattagggttgtgaatattttgttggtggagtt

SEQ ID NO: 1449 - DNA, 50 bp, Artificial Sequence
  Description of Artificial Sequence: Synthetic probe
ctctacatatattaaaaataattatacactatccacaaaactattaacac

SEQ ID NO: 1450 - DNA, 50 bp, Artificial Sequence
  Description of Artificial Sequence: Synthetic probe
ctataccctcctacattaaaataaattcaccctccaaactaacacaaaac

SEQ ID NO: 1451 - DNA, 50 bp, Artificial Sequence
  Description of Artificial Sequence: Synthetic probe
cacaccrtctttaaattccactcctaatacttttccatccataaaaaccc

SEQ ID NO: 1452 - DNA, 50 bp, Artificial Sequence
  Description of Artificial Sequence: Synthetic probe
aacaaccacaaaaaaaactaaatacccaaccaatattttcttaaaacttc

SEQ ID NO: 1453 - DNA, 50 bp, Artificial Sequence
  Description of Artificial Sequence: Synthetic probe
atccaaaaaataaacatattcatcatctccaaaaacttctaccactctac

SEQ ID NO: 1454 - DNA, 50 bp, Artificial Sequence
  Description of Artificial Sequence: Synthetic probe
tctaataatataaatctccttcaactcaacaaaccaccttaatctacctc

SEQ ID NO: 1455 - DNA, 50 bp, Artificial Sequence
  Description of Artificial Sequence: Synthetic probe
ctataatttaattctataaaatctctataaatcaaaacraccactaaaac

SEQ ID NO: 1456 - DNA, 50 bp, Artificial Sequence
  Description of Artificial Sequence: Synthetic probe
attatagtttggttttgtgagatttttatgaattaaggyggttattgaag

SEQ ID NO: 1457 - DNA, 50 bp, Artificial Sequence
  Description of Artificial Sequence: Synthetic probe
aatttactcactcttccaatccatattattaaatcttactctataattcc

SEQ ID NO: 1458 - DNA, 50 bp, Artificial Sequence
  Description of Artificial Sequence: Synthetic probe
actaacacaaacatacaaccactatacaatacttaaaaacacaaccatcc

SEQ ID NO: 1459 - DNA, 50 bp, Artificial Sequence
  Description of Artificial Sequence: Synthetic probe
atactatactctattcctactaatcctactcacraaaatcctataccacc

SEQ ID NO: 1460 - DNA, 50 bp, Artificial Sequence
  Description of Artificial Sequence: Synthetic probe
tactatactctattcctactaatcctactcacaaaaatcctataccacca

SEQ ID NO: 1461 - DNA, 50 bp, Artificial Sequence
  Description of Artificial Sequence: Synthetic probe
ccaaaaactaaaaaacttcaatccccccttcaaattatatcttcataaac

SEQ ID NO: 1462 - DNA, 50 bp, Artificial Sequence
  Description of Artificial Sequence: Synthetic probe
caaaaactaaaaaacttcaatccccccttcaaattatatcttcataaaca

SEQ ID NO: 1463 - DNA, 50 bp, Artificial Sequence
  Description of Artificial Sequence: Synthetic probe
taatggagttaatgatattgttaatgatttatttgttaggaatgaagttt

SEQ ID NO: 1464 - DNA, 50 bp, Artificial Sequence
  Description of Artificial Sequence: Synthetic probe
aatggagttaatgatattgttaatgatttatttgttaggaatgaagtttt

SEQ ID NO: 1465 - DNA, 50 bp, Artificial Sequence
  Description of Artificial Sequence: Synthetic probe
rttcatataacrattaaaattactactataattaaactacttaccacaac

SEQ ID NO: 1466 - DNA, 50 bp, Artificial Sequence
  Description of Artificial Sequence: Synthetic probe
raaaactcaatcttattaaattcctaaaacaatcrcccatcctaaaatac

SEQ ID NO: 1467 - DNA, 50 bp, Artificial Sequence
  Description of Artificial Sequence: Synthetic probe
aaataaacaactaaaataaaccccacaaaaaaaccactatcctcccctcc

SEQ ID NO: 1468 - DNA, 50 bp, Artificial Sequence
  Description of Artificial Sequence: Synthetic probe
attccaactcatctatcttccctttctctaaactcttcaaaacatttacc

SEQ ID NO: 1469 - DNA, 50 bp, Artificial Sequence
  Description of Artificial Sequence: Synthetic probe
ctacacaaaaccaccaaccttcaacactaaatcttccaaactacttactc

SEQ ID NO: 1470 - DNA, 50 bp, Artificial Sequence
  Description of Artificial Sequence: Synthetic probe
attaactaccaaatttctaaatatcttaatcctttataattaatccracc

SEQ ID NO: 1471 - DNA, 50 bp, Artificial Sequence
  Description of Artificial Sequence: Synthetic probe
ataaaaattaaaacaaaaacaacctaacrcaaaataaaacatttataaac

SEQ ID NO: 1472 - DNA, 50 bp, Artificial Sequence
  Description of Artificial Sequence: Synthetic probe
cttcaaccraaactaacrtataaatcctctaaatcctaacaatcctaaac

SEQ ID NO: 1473 - DNA, 50 bp, Artificial Sequence
  Description of Artificial Sequence: Synthetic probe
ctaaaatttaaaaactaaatcaaatcatactctaaattctttactcactc

SEQ ID NO: 1474 - DNA, 50 bp, Artificial Sequence
  Description of Artificial Sequence: Synthetic probe
ctactactccactcacrttctaaacacctatatctcaactaaatataacc

SEQ ID NO: 1475 - DNA, 50 bp, Artificial Sequence
  Description of Artificial Sequence: Synthetic probe
aactatataaaccaacaaattactttcccccttaacrtctaactatcctc

SEQ ID NO: 1476 - DNA, 50 bp, Artificial Sequence
  Description of Artificial Sequence: Synthetic probe
craaaactaaaatcacccatcacccttccctaatctacraaaaataaaac

SEQ ID NO: 1477 - DNA, 50 bp, Artificial Sequence
  Description of Artificial Sequence: Synthetic probe
ataaaattaaatatccrtcttaatcrataattacccatattttaataaac

SEQ ID NO: 1478 - DNA, 50 bp, Artificial Sequence
  Description of Artificial Sequence: Synthetic probe
attctacacraatttcaaaaataactcatcaactttaacataaaccctac

SEQ ID NO: 1479 - DNA, 50 bp, Artificial Sequence
  Description of Artificial Sequence: Synthetic probe
aacttctacaatttctatttccttaactaacaactcaacraaaccctccc

SEQ ID NO: 1480 - DNA, 50 bp, Artificial Sequence
  Description of Artificial Sequence: Synthetic probe
tttttcttcaaaaaaatctcactataaacccattaaaaaaaccctctacc

SEQ ID NO: 1481 - DNA, 50 bp, Artificial Sequence
  Description of Artificial Sequence: Synthetic probe
caaatcccctctaaaacccacattaataactacccccaaaaaattacaac

SEQ ID NO: 1482 - DNA, 50 bp, Artificial Sequence
  Description of Artificial Sequence: Synthetic probe
aaacaaaatcttaaaaacaaatcctaaaccaactacaacaaaatataccc

SEQ ID NO: 1483 - DNA, 50 bp, Artificial Sequence
  Description of Artificial Sequence: Synthetic probe
ctcaaaaaccctaatcctaacccaaacctaaacaaataaatacaaaatca

SEQ ID NO: 1484 - DNA, 50 bp, Artificial Sequence
  Description of Artificial Sequence: Synthetic probe
acaaaatcttatatctcctatcraacttcacctataaaaacrtaccctcc

SEQ ID NO: 1485 - DNA, 50 bp, Artificial Sequence
  Description of Artificial Sequence: Synthetic probe
aaaaaaaaaataactaactataacracraccaattacrtaacraacctac

SEQ ID NO: 1486 - DNA, 50 bp, Artificial Sequence
  Description of Artificial Sequence: Synthetic probe
ttaaaaggttaaaaattttattagtyggaagtgaygtgttagtttagttt

SEQ ID NO: 1487 - DNA, 50 bp, Artificial Sequence
  Description of Artificial Sequence: Synthetic probe
taaaaaactaaaaactccactaatcraaaataacrtaccaacttaacccc

SEQ ID NO: 1488 - DNA, 50 bp, Artificial Sequence
  Description of Artificial Sequence: Synthetic probe
taaccaataaaatattaacaaacatacaacaaaatctcattaccaaacac

SEQ ID NO: 1489 - DNA, 50 bp, Artificial Sequence
  Description of Artificial Sequence: Synthetic probe
ttactaaaaaactataatacaaaaaataaacctcaccctaccttcaaaac

SEQ ID NO: 1490 - DNA, 50 bp, Artificial Sequence
  Description of Artificial Sequence: Synthetic probe
tacatcataatacaaaataccctcttataaactccaacttcaactaaacc

SEQ ID NO: 1491 - DNA, 50 bp, Artificial Sequence
  Description of Artificial Sequence: Synthetic probe
aacataacattaacttaaactcattacaaaactaataacaaaaaacaaac

SEQ ID NO: 1492 - DNA, 50 bp, Artificial Sequence
  Description of Artificial Sequence: Synthetic probe
ggtttagttgaagttggagtttataagagggtattttgtattatgatgta

SEQ ID NO: 1493 - DNA, 50 bp, Artificial Sequence
  Description of Artificial Sequence: Synthetic probe
accacaaaccaccatatacttcaatcacacaaatcataaaacaactaaac

SEQ ID NO: 1494 - DNA, 50 bp, Artificial Sequence
  Description of Artificial Sequence: Synthetic probe
ttcttaccatcaactctacaataaattcaaactaataccatatcccaacc

SEQ ID NO: 1495 - DNA, 50 bp, Artificial Sequence
  Description of Artificial Sequence: Synthetic probe
aattcttaattaatctaaacttttctaaacatactaatctattccctaac

SEQ ID NO: 1496 - DNA, 50 bp, Artificial Sequence
  Description of Artificial Sequence: Synthetic probe
taatctaaacttttctaaacatactaatctattccctaacrcrtctaacc

SEQ ID NO: 1497 - DNA, 50 bp, Artificial Sequence
  Description of Artificial Sequence: Synthetic probe
cccttctttcrtctaacttttatctctttacaacactataaaataacacc

SEQ ID NO: 1498 - DNA, 50 bp, Artificial Sequence
  Description of Artificial Sequence: Synthetic probe
ctctactataaaactcaatttcttcctaaatcaaaaaattaatttctacc

SEQ ID NO: 1499 - DNA, 50 bp, Artificial Sequence
  Description of Artificial Sequence: Synthetic probe
aaaaattaaaaaattcactattattccttaacttacaaaaatccaaaccc

SEQ ID NO: 1500 - DNA, 50 bp, Artificial Sequence
  Description of Artificial Sequence: Synthetic probe
atttagtaatagttaaagttgaaagtggggattttattatttgatgtggg

SEQ ID NO: 1501 - DNA, 50 bp, Artificial Sequence
  Description of Artificial Sequence: Synthetic probe
ttaaataccttaacaatataaatttcaatacaataaaaatttaaactatc

SEQ ID NO: 1502 - DNA, 50 bp, Artificial Sequence
  Description of Artificial Sequence: Synthetic probe
ataacracacactttcctttctaaaactctaaactctaactctccctctc

SEQ ID NO: 1503 - DNA, 50 bp, Artificial Sequence
  Description of Artificial Sequence: Synthetic probe
craatatctataaccaaaacaaaaaacacrcaccttatcataccaacacc

SEQ ID NO: 1504 - DNA, 50 bp, Artificial Sequence
  Description of Artificial Sequence: Synthetic probe
ataacrcctacttccaaaaataacctacccaaactattttaataacaaac

SEQ ID NO: 1505 - DNA, 50 bp, Artificial Sequence
  Description of Artificial Sequence: Synthetic probe
cctcrctcctcattaaataacracttttaccctaacaaccaataaaaaac

SEQ ID NO: 1506 - DNA, 50 bp, Artificial Sequence
  Description of Artificial Sequence: Synthetic probe
atttygttttttattagatggyggtttttgttttgatagttaatggggaa

SEQ ID NO: 1507 - DNA, 50 bp, Artificial Sequence
  Description of Artificial Sequence: Synthetic probe
ccaaacaaatctaaatcttttccaataactatccctctctatactccccc

SEQ ID NO: 1508 - DNA, 50 bp, Artificial Sequence
  Description of Artificial Sequence: Synthetic probe
atttaaacacacaactcaaaatatatacraaaactacactactaccattc

SEQ ID NO: 1509 - DNA, 50 bp, Artificial Sequence
  Description of Artificial Sequence: Synthetic probe
ataaataacccaaaccactttaaactcaaaaactcaattattcaatctac

SEQ ID NO: 1510 - DNA, 50 bp, Artificial Sequence
  Description of Artificial Sequence: Synthetic probe
ggtttaggtatatagtttaggatgtatayggaggttatattgttgttatt

SEQ ID NO: 1511 - DNA, 50 bp, Artificial Sequence
  Description of Artificial Sequence: Synthetic probe
aatayggtaggtagttttatttgyggttgtttttatgatttagtgttagg

SEQ ID NO: 1512 - DNA, 50 bp, Artificial Sequence
  Description of Artificial Sequence: Synthetic probe
atacracaaacaacttcacctacractacccccataacctaatactaaac

SEQ ID NO: 1513 - DNA, 50 bp, Artificial Sequence
  Description of Artificial Sequence: Synthetic probe
aatataacttcraataacraaaaacrctacrattaaccctcractataac

SEQ ID NO: 1514 - DNA, 50 bp, Artificial Sequence
  Description of Artificial Sequence: Synthetic probe
cccaaatctacctactatctaatttaaataacctccaaaatttttaatac

SEQ ID NO: 1515 - DNA, 50 bp, Artificial Sequence
  Description of Artificial Sequence: Synthetic probe
crcraaacraaaacaaaaaacrctaaaaaccaaaccracctatcrcaatc

SEQ ID NO: 1516 - DNA, 50 bp, Artificial Sequence
  Description of Artificial Sequence: Synthetic probe
aacttcccaaacaatcrtaaacrccatatatttacrcractaaaacaaac

SEQ ID NO: 1517 - DNA, 50 bp, Artificial Sequence
  Description of Artificial Sequence: Synthetic probe
cctaattcaataaaaacrtaacctacaataacraaacraaaccracrtcc

SEQ ID NO: 1518 - DNA, 50 bp, Artificial Sequence
  Description of Artificial Sequence: Synthetic probe
ttatttttccrtttcataaaaacaacaactatctactaataattcctacc

SEQ ID NO: 1519 - DNA, 50 bp, Artificial Sequence
  Description of Artificial Sequence: Synthetic probe
ctaaaacaaaactataatactatattcccttctaccacctaataaccrac

SEQ ID NO: 1520 - DNA, 50 bp, Artificial Sequence
  Description of Artificial Sequence: Synthetic probe
ttcattatcrtaaaaaccaattaccractatatacctacacraataaaac

SEQ ID NO: 1521 - DNA, 50 bp, Artificial Sequence
  Description of Artificial Sequence: Synthetic probe
tcaatccttattcctattctcttctacaaccaatcactcccttaaaaaca

SEQ ID NO: 1522 - DNA, 50 bp, Artificial Sequence
  Description of Artificial Sequence: Synthetic probe
aaaaaataacratccaattaaaacccrttttaactacactcacctctctc

SEQ ID NO: 1523 - DNA, 50 bp, Artificial Sequence
  Description of Artificial Sequence: Synthetic probe
ctacttatttttcaactttcctaaataccctacccatatccaaaaactac

SEQ ID NO: 1524 - DNA, 50 bp, Artificial Sequence
  Description of Artificial Sequence: Synthetic probe
aaaatacttataaccctaataaattccaaatcctcttccctaccacctcc

SEQ ID NO: 1525 - DNA, 50 bp, Artificial Sequence
  Description of Artificial Sequence: Synthetic probe
cttatctaattttataacrtatatcacttattctcatattttctaaatcc

SEQ ID NO: 1526 - DNA, 50 bp, Artificial Sequence
  Description of Artificial Sequence: Synthetic probe
ataataaattagatttatgaggaaaygtattttggaataggtttgaattg

SEQ ID NO: 1527 - DNA, 50 bp, Artificial Sequence
  Description of Artificial Sequence: Synthetic probe
ctacctaataactaacaccttaaaaataaaatttataacrtcatcrttac

SEQ ID NO: 1528 - DNA, 50 bp, Artificial Sequence
  Description of Artificial Sequence: Synthetic probe
tttgtttggtgattgatattttggaaatgaagtttatgaygttatygttg

SEQ ID NO: 1529 - DNA, 50 bp, Artificial Sequence
  Description of Artificial Sequence: Synthetic probe
ttaactttaatcttaaacaaccttaaaatctctccrtaccrtaaacctac

SEQ ID NO: 1530 - DNA, 50 bp, Artificial Sequence
  Description of Artificial Sequence: Synthetic probe
aaaataaaacratccaaaaactcacaaatctcactaaaaaaaaatctaac

SEQ ID NO: 1531 - DNA, 50 bp, Artificial Sequence
  Description of Artificial Sequence: Synthetic probe
cttaaaaaatccctctactacccccttaaatcctccatcaaaaaaacttc

SEQ ID NO: 1532 - DNA, 50 bp, Artificial Sequence
  Description of Artificial Sequence: Synthetic probe
aataaacctaaataaaaattctcaaatatcatcaaatccctacaaccaac

SEQ ID NO: 1533 - DNA, 50 bp, Artificial Sequence
  Description of Artificial Sequence: Synthetic probe
cccaaatctatttatctcccaaactaacactttctccaactaaaaaaaac

SEQ ID NO: 1534 - DNA, 50 bp, Artificial Sequence
  Description of Artificial Sequence: Synthetic probe
aatatacaaataaactttatttttatatctaacatacttaaatccatacc

SEQ ID NO: 1535 - DNA, 50 bp, Artificial Sequence
  Description of Artificial Sequence: Synthetic probe
actatttttctaaatttatcccaacctataccttataccccaaactcacc

SEQ ID NO: 1536 - DNA, 50 bp, Artificial Sequence
  Description of Artificial Sequence: Synthetic probe
ttaaaaaacraataaatataaaaatacaaaacraacracracrtccrtcc

SEQ ID NO: 1537 - DNA, 50 bp, Artificial Sequence
  Description of Artificial Sequence: Synthetic probe
acrcacacaaactaaaaaatcctcaaaactcctaccaacaaaactacctc

SEQ ID NO: 1538 - DNA, 50 bp, Artificial Sequence
  Description of Artificial Sequence: Synthetic probe
crtaaaccaccrtacccracccaatattaaaatcttaaaaaaatataacc

SEQ ID NO: 1539 - DNA, 50 bp, Artificial Sequence
  Description of Artificial Sequence: Synthetic probe
gatttggagtaaggttttttgtttgttgatttgttaggtatttagatagg

SEQ ID NO: 1540 - DNA, 50 bp, Artificial Sequence
  Description of Artificial Sequence: Synthetic probe
atctaaaacaaaaccccttacctactaatttatcaaacatccaaacaaac

SEQ ID NO: 1541 - DNA, 50 bp, Artificial Sequence
  Description of Artificial Sequence: Synthetic probe
actaatttatcaaacatccaaacaaacraaactataaaaactcccratcc

SEQ ID NO: 1542 - DNA, 50 bp, Artificial Sequence
  Description of Artificial Sequence: Synthetic probe
aaacatccaaacaaacraaactataaaaactcccratccraaactacctc

SEQ ID NO: 1543 - DNA, 50 bp, Artificial Sequence
  Description of Artificial Sequence: Synthetic probe
acctttaaaaaatacatttcacctctcttaaaaaataacaaaaaccttcc

SEQ ID NO: 1544 - DNA, 50 bp, Artificial Sequence
  Description of Artificial Sequence: Synthetic probe
aaaatttcttcractacaacaatcccraaacctttatttcccaatactac

SEQ ID NO: 1545 - DNA, 50 bp, Artificial Sequence
  Description of Artificial Sequence: Synthetic probe
gaagattggatggtatttttaaggggaaaagtaaattatgtgtagtatgt

SEQ ID NO: 1546 - DNA, 50 bp, Artificial Sequence
  Description of Artificial Sequence: Synthetic probe
aataaaaatttcraaactattataaccraaaaaactttatcraacaaaac

SEQ ID NO: 1547 - DNA, 50 bp, Artificial Sequence
  Description of Artificial Sequence: Synthetic probe
actattataaccraaaaaactttatcraacaaaacrtttctaaataaaac

SEQ ID NO: 1548 - DNA, 50 bp, Artificial Sequence
  Description of Artificial Sequence: Synthetic probe
raaaacrtatttaaaccraatcaaacratccccatttttcccctactcrc

SEQ ID NO: 1549 - DNA, 50 bp, Artificial Sequence
  Description of Artificial Sequence: Synthetic probe
tattataaccraaaaaactttatcraacaaaacrtttctaaataaaacrc

SEQ ID NO: 1550 - DNA, 50 bp, Artificial Sequence
  Description of Artificial Sequence: Synthetic probe
ttaaccrtatttccatttaacrtccaaaacaacraaaacrtatttaaacc

SEQ ID NO: 1551 - DNA, 50 bp, Artificial Sequence
  Description of Artificial Sequence: Synthetic probe
aaaataaaaaccrtttaattcrattcaaacacrttttcrttactctaaac

SEQ ID NO: 1552 - DNA, 50 bp, Artificial Sequence
  Description of Artificial Sequence: Synthetic probe
tcaaacaaaaaaaatcctttaactaaattttaaccrtatttccatttaac

SEQ ID NO: 1553 - DNA, 50 bp, Artificial Sequence
  Description of Artificial Sequence: Synthetic probe
taattcrattcaaacacrttttcrttactctaaacrccaaataaaaacac

SEQ ID NO: 1554 - DNA, 50 bp, Artificial Sequence
  Description of Artificial Sequence: Synthetic probe
ttgattyggtttaaataygttttygttgttttggaygttaaatggaaata

SEQ ID NO: 1555 - DNA, 50 bp, Artificial Sequence
  Description of Artificial Sequence: Synthetic probe
aaaacacraccaaaatttaattaaaaaacttctcttacctaaaaattttc

SEQ ID NO: 1556 - DNA, 50 bp, Artificial Sequence
  Description of Artificial Sequence: Synthetic probe
aggggtatttgttattttaatttagaggttaaattygtgagattttygtt

SEQ ID NO: 1557 - DNA, 50 bp, Artificial Sequence
  Description of Artificial Sequence: Synthetic probe
cacraccaaaatttaattaaaaaacttctcttacctaaaaattttcraac

SEQ ID NO: 1558 - DNA, 50 bp, Artificial Sequence
  Description of Artificial Sequence: Synthetic probe
cacaaaaacacttatcatcccaacccaaaaaccaaacccrtaaaatcccc

SEQ ID NO: 1559 - DNA, 50 bp, Artificial Sequence
  Description of Artificial Sequence: Synthetic probe
tttaattaaaaaacttctcttacctaaaaattttcraacraaaatctcac

SEQ ID NO: 1560 - DNA, 50 bp, Artificial Sequence
  Description of Artificial Sequence: Synthetic probe
aaattaaaataacaaatacccctataaaatacacaaccccaaacctcatc

SEQ ID NO: 1561 - DNA, 50 bp, Artificial Sequence
  Description of Artificial Sequence: Synthetic probe
tacccaaaaaaaaacaatcacatatatacactaaactcccctatttccac

SEQ ID NO: 1562 - DNA, 50 bp, Artificial Sequence
  Description of Artificial Sequence: Synthetic probe
taccaattttataaaacaaatactctctatacactaattatcaactatcc

SEQ ID NO: 1563 - DNA, 50 bp, Artificial Sequence
  Description of Artificial Sequence: Synthetic probe
acaaataaaaaactcaaaaataaaattctatttaccctaaacaactctcc

SEQ ID NO: 1564 - DNA, 50 bp, Artificial Sequence
  Description of Artificial Sequence: Synthetic probe
gtaagggataatataagttttggatttattgttgttggtttttaaggttg

SEQ ID NO: 1565 - DNA, 50 bp, Artificial Sequence
  Description of Artificial Sequence: Synthetic probe
caaaaaataacacaaaccttaaatttattactactaatccccaaaactac

SEQ ID NO: 1566 - DNA, 50 bp, Artificial Sequence
  Description of Artificial Sequence: Synthetic probe
agaaagaggatgttttttaatgttttagtgtagygagttatgtgttgtta

SEQ ID NO: 1567 - DNA, 50 bp, Artificial Sequence
  Description of Artificial Sequence: Synthetic probe
aaaaaaaaatatcctttaatactttaatacaacraatcatatattatcac

SEQ ID NO: 1568 - DNA, 50 bp, Artificial Sequence
  Description of Artificial Sequence: Synthetic probe
aacctcaaaaacatccatcctaaattttatatcrtaacaacacataactc

SEQ ID NO: 1569 - DNA, 50 bp, Artificial Sequence
  Description of Artificial Sequence: Synthetic probe
acattattaatattattttaattacactctaaattctattaaaattctcc

SEQ ID NO: 1570 - DNA, 50 bp, Artificial Sequence
  Description of Artificial Sequence: Synthetic probe
aaaatacactaatcaatttttaatatataacaaacaccctcaaaaactcc

SEQ ID NO: 1571 - DNA, 50 bp, Artificial Sequence
  Description of Artificial Sequence: Synthetic probe
catacaaaaacaaatctatctttttatactcataaatttacaaatcaacc

SEQ ID NO: 1572 - DNA, 50 bp, Artificial Sequence
  Description of Artificial Sequence: Synthetic probe
actaaaataaactaaactccaaacttcaatcaaattcaaatttatttcac

SEQ ID NO: 1573 - DNA, 50 bp, Artificial Sequence
  Description of Artificial Sequence: Synthetic probe
taccccaaataactactacracttcaaccttaaccctaaaataaaaatac

SEQ ID NO: 1574 - DNA, 50 bp, Artificial Sequence
  Description of Artificial Sequence: Synthetic probe
taataaacaaaacrcaaaaaaccataaacaataaaatataaatcaacatc

SEQ ID NO: 1575 - DNA, 50 bp, Artificial Sequence
  Description of Artificial Sequence: Synthetic probe
atgatgagtaagaygtagaaaattatgggtagtaggatatgaattagtat

SEQ ID NO: 1576 - DNA, 50 bp, Artificial Sequence
  Description of Artificial Sequence: Synthetic probe
ctcrttcaacctcratactaattcatatcctactacccataattttctac

SEQ ID NO: 1577 - DNA, 50 bp, Artificial Sequence
  Description of Artificial Sequence: Synthetic probe
taccraacraaatctatccaaacaactcctctccctaaccaaataaaaac

SEQ ID NO: 1578 - DNA, 50 bp, Artificial Sequence
  Description of Artificial Sequence: Synthetic probe
ccattctatctattactatcaactataactcaatcccctaattaacttac

SEQ ID NO: 1579 - DNA, 50 bp, Artificial Sequence
  Description of Artificial Sequence: Synthetic probe
tgttttggaaaaatgttttattaaagttggtttttgagggatatgaggtt

SEQ ID NO: 1580 - DNA, 50 bp, Artificial Sequence
  Description of Artificial Sequence: Synthetic probe
attctaaaaaaataccctactaaaactaacttctaaaaaacataaaatcc

SEQ ID NO: 1581 - DNA, 50 bp, Artificial Sequence
  Description of Artificial Sequence: Synthetic probe
taaaatttcttaataccatttttaatccctttataaataataaaaatacc

SEQ ID NO: 1582 - DNA, 50 bp, Artificial Sequence
  Description of Artificial Sequence: Synthetic probe
tatttgggttttggaattttataaaaggatattgttaagttatatatgag

SEQ ID NO: 1583 - DNA, 50 bp, Artificial Sequence
  Description of Artificial Sequence: Synthetic probe
atctaaactctaaaacttcacaaaaaaacactattaaatcacacataaac

SEQ ID NO: 1584 - DNA, 50 bp, Artificial Sequence
  Description of Artificial Sequence: Synthetic probe
ttttttgtttaaatatgatgaaagatattagagttatgtttaggttggtg

SEQ ID NO: 1585 - DNA, 50 bp, Artificial Sequence
  Description of Artificial Sequence: Synthetic probe
cctttacttaaacataataaaaaacaccaaaaccatactcaaactaatac

SEQ ID NO: 1586 - DNA, 50 bp, Artificial Sequence
  Description of Artificial Sequence: Synthetic probe
tttttggtatgaggggttatagtggttataatttgaattttgagtaggta

SEQ ID NO: 1587 - DNA, 50 bp, Artificial Sequence
  Description of Artificial Sequence: Synthetic probe
acataaataatccctatattaaaaatactcctcaataatacctattaaac

SEQ ID NO: 1588 - DNA, 50 bp, Artificial Sequence
  Description of Artificial Sequence: Synthetic probe
tcatatcttcaaaaaattcacaattcaccaaaaaaaacattcaaaccaac

SEQ ID NO: 1589 - DNA, 50 bp, Artificial Sequence
  Description of Artificial Sequence: Synthetic probe
tacctacataaataaaaaaccaaactttctatcatctccaataatcttac

SEQ ID NO: 1590 - DNA, 50 bp, Artificial Sequence
  Description of Artificial Sequence: Synthetic probe
agtaagagataggtagagaaaatttatttaggtagagagaattaattaag

SEQ ID NO: 1591 - DNA, 50 bp, Artificial Sequence
  Description of Artificial Sequence: Synthetic probe
aacaaaaaccatttttattcatattcrtatcctaacccctattatactac

SEQ ID NO: 1592 - DNA, 50 bp, Artificial Sequence
  Description of Artificial Sequence: Synthetic probe
ccatttccatataccataaaataaaaacaaaatactcactaatcctttcc

SEQ ID NO: 1593 - DNA, 50 bp, Artificial Sequence
  Description of Artificial Sequence: Synthetic probe
tattgtattgataygttaatgtaaatgggagataaatttttagagtgttt

SEQ ID NO: 1594 - DNA, 50 bp, Artificial Sequence
  Description of Artificial Sequence: Synthetic probe
acccaaaaccaaaaaaaattttcctactacctataacactacactaatac

SEQ ID NO: 1595 - DNA, 50 bp, Artificial Sequence
  Description of Artificial Sequence: Synthetic probe
actaatcctttccraaacactctaaaaatttatctcccatttacattaac

SEQ ID NO: 1596 - DNA, 50 bp, Artificial Sequence
  Description of Artificial Sequence: Synthetic probe
tgttttaggagttaggagttttaaatattgttttgtggattggttgtatt

SEQ ID NO: 1597 - DNA, 50 bp, Artificial Sequence
  Description of Artificial Sequence: Synthetic probe
attttaaaaaccaaaaatcccaaatattactctataaactaactacatcc

SEQ ID NO: 1598 - DNA, 50 bp, Artificial Sequence
  Description of Artificial Sequence: Synthetic probe
ttacaaaataaactcttaaactatactcccaaactatcaaatcaaaaaac

SEQ ID NO: 1599 - DNA, 50 bp, Artificial Sequence
  Description of Artificial Sequence: Synthetic probe
aactcaaaaaacttaaaactaaaaataactctttctcacttatcctccac

SEQ ID NO: 1600 - DNA, 50 bp, Artificial Sequence
  Description of Artificial Sequence: Synthetic probe
aaaacaaaaactttcatataaaaaaatctaattcaacaatacacaaatac

SEQ ID NO: 1601 - DNA, 50 bp, Artificial Sequence
  Description of Artificial Sequence: Synthetic probe
catccccaaactcaaacttcaaattccaccttacttcrccataaaaactc

SEQ ID NO: 1602 - DNA, 50 bp, Artificial Sequence
  Description of Artificial Sequence: Synthetic probe
aaactaaatcaaattcaaaaacrtttcactaacctataataacaaaaaac

SEQ ID NO: 1603 - DNA, 50 bp, Artificial Sequence
  Description of Artificial Sequence: Synthetic probe
ccttacttcrccataaaaactcrcttcctaccattataaattaataaaac

SEQ ID NO: 1604 - DNA, 50 bp, Artificial Sequence
  Description of Artificial Sequence: Synthetic probe
accaaactctatataacatatctttcaatccaccctaacaataaacttac

SEQ ID NO: 1605 - DNA, 50 bp, Artificial Sequence
  Description of Artificial Sequence: Synthetic probe
tttttttaaaacaaaatctcrcttatccaaactaactaaaatacaacrac

SEQ ID NO: 1606 - DNA, 50 bp, Artificial Sequence
  Description of Artificial Sequence: Synthetic probe
aaataactaaaaaaataacaatcacattatactcttataaattaaaccac

SEQ ID NO: 1607 - DNA, 50 bp, Artificial Sequence
  Description of Artificial Sequence: Synthetic probe
tataaaaactaacaattcaatcatcatttcaattttaacaaataaacacc

SEQ ID NO: 1608 - DNA, 50 bp, Artificial Sequence
  Description of Artificial Sequence: Synthetic probe
aaaaaaaccacttaaacattcatatataaaaaattattataaatcttctc

SEQ ID NO: 1609 - DNA, 50 bp, Artificial Sequence
  Description of Artificial Sequence: Synthetic probe
aaaaacaacaacatcacttaccttatacataaaaaactccctaatatacc

SEQ ID NO: 1610 - DNA, 50 bp, Artificial Sequence
  Description of Artificial Sequence: Synthetic probe
taacaacatacacacrctaaaaacccrtctacctaacraaataaaatatc

SEQ ID NO: 1611 - DNA, 50 bp, Artificial Sequence
  Description of Artificial Sequence: Synthetic probe
cttatattttataaatctctcctatacatttccaattcttctaaaactac

SEQ ID NO: 1612 - DNA, 50 bp, Artificial Sequence
  Description of Artificial Sequence: Synthetic probe
tacaatctaaataataaccctatccccactccaaaaatcacaatcacatc

SEQ ID NO: 1613 - DNA, 50 bp, Artificial Sequence
  Description of Artificial Sequence: Synthetic probe
tttttaaygtttttaaagttgttttgggataagaggggaggaaggtttaa

SEQ ID NO: 1614 - DNA, 50 bp, Artificial Sequence
  Description of Artificial Sequence: Synthetic probe
ttactctatattaaatctacaccacatctacacatactataaacccttcc

SEQ ID NO: 1615 - DNA, 50 bp, Artificial Sequence
  Description of Artificial Sequence: Synthetic probe
ttaggtagtaagttggttataattttttatttgggggttgttgataggtt

SEQ ID NO: 1616 - DNA, 50 bp, Artificial Sequence
  Description of Artificial Sequence: Synthetic probe
caaacaataaattaatcacaacctctcacctaaaaactactaacaaaccc

SEQ ID NO: 1617 - DNA, 50 bp, Artificial Sequence
  Description of Artificial Sequence: Synthetic probe
cctcaacaacaaccaacraacttaaacrcctacctctaactactaaaaac

SEQ ID NO: 1618 - DNA, 50 bp, Artificial Sequence
  Description of Artificial Sequence: Synthetic probe
ttaaaacaataacaaaaaacaattaccaaaactaaatacttaaatctctc

SEQ ID NO: 1619 - DNA, 50 bp, Artificial Sequence
  Description of Artificial Sequence: Synthetic probe
ctaaaaaaaaaccraaactaaaattattaaccrcrcracratactaaacc

SEQ ID NO: 1620 - DNA, 50 bp, Artificial Sequence
  Description of Artificial Sequence: Synthetic probe
ttttctcttaatttccccrctaacaaaaaaataacaaccctctcaatatc

SEQ ID NO: 1621 - DNA, 50 bp, Artificial Sequence
  Description of Artificial Sequence: Synthetic probe
ataaaaaacaacaataacaataattctcatccctaaacctcctccraacc

SEQ ID NO: 1622 - DNA, 50 bp, Artificial Sequence
  Description of Artificial Sequence: Synthetic probe
catacacacrctaaaaacccrtctacctaacraaataaaatatcrcttcc

SEQ ID NO: 1623 - DNA, 50 bp, Artificial Sequence
  Description of Artificial Sequence: Synthetic probe
acctaacaacaaataatatcctaaaactaactatcactccaacaaatcac

SEQ ID NO: 1624 - DNA, 50 bp, Artificial Sequence
  Description of Artificial Sequence: Synthetic probe
acaaacaaaaaaccttaaaaaatcatccacataattaccccatctctccc

SEQ ID NO: 1625 - DNA, 50 bp, Artificial Sequence
  Description of Artificial Sequence: Synthetic probe
tgtttagtaataagtggtgttttggagttggttgttattttagtaggtta

SEQ ID NO: 1626 - DNA, 50 bp, Artificial Sequence
  Description of Artificial Sequence: Synthetic probe
acttaaaataataaacataacataaataataattatcaaaccaaaccatc

SEQ ID NO: 1627 - DNA, 50 bp, Artificial Sequence
  Description of Artificial Sequence: Synthetic probe
caaaaccccctctctattcaattcctaaataatcacaaaaccaacraaac

SEQ ID NO: 1628 - DNA, 50 bp, Artificial Sequence
  Description of Artificial Sequence: Synthetic probe
craaaaacccatacaccacrataaccracttataaaacrcrcrataaaac

SEQ ID NO: 1629 - DNA, 50 bp, Artificial Sequence
  Description of Artificial Sequence: Synthetic probe
cctcctacctcrcctccraaaactctaattttacaaatataaaccataac

SEQ ID NO: 1630 - DNA, 50 bp, Artificial Sequence
  Description of Artificial Sequence: Synthetic probe
ttaaaaataacaccacccccatctctccctactcttcacaaaaaattcca

SEQ ID NO: 1631 - DNA, 50 bp, Artificial Sequence
  Description of Artificial Sequence: Synthetic probe
cacccacctttccaaatataaaccrttcracaaaaaattaactttaaacc

SEQ ID NO: 1632 - DNA, 50 bp, Artificial Sequence
  Description of Artificial Sequence: Synthetic probe
aacctataaaatttacctactaacctcctctcaacaactcactattacrc

SEQ ID NO: 1633 - DNA, 50 bp, Artificial Sequence
  Description of Artificial Sequence: Synthetic probe
tacttaacaaccraacctctaacactcactatttctaaaatttaattaac

SEQ ID NO: 1634 - DNA, 50 bp, Artificial Sequence
  Description of Artificial Sequence: Synthetic probe
atcatccaaacaaaactcacaataataccrcttcttaaaaaacaactccc

SEQ ID NO: 1635 - DNA, 50 bp, Artificial Sequence
  Description of Artificial Sequence: Synthetic probe
aaactaccacttactaactaaaaaaaaccrctacracrttccactatcac

SEQ ID NO: 1636 - DNA, 50 bp, Artificial Sequence
  Description of Artificial Sequence: Synthetic probe
aaaaacaaaccttaactctcacccaattaacaaacrtttatccaacrcac

SEQ ID NO: 1637 - DNA, 50 bp, Artificial Sequence
  Description of Artificial Sequence: Synthetic probe
acracacaaaaatataaaacrccrtattaaaaatactaaacraccccrac

SEQ ID NO: 1638 - DNA, 50 bp, Artificial Sequence
  Description of Artificial Sequence: Synthetic probe
tataaataaaaacrctacaaaataataatcaaaacacaaacatcaacatc

SEQ ID NO: 1639 - DNA, 50 bp, Artificial Sequence
  Description of Artificial Sequence: Synthetic probe
caaaatctatatccttcccactctaaataaaacttaaaccaaaaatatcc

SEQ ID NO: 1640 - DNA, 50 bp, Artificial Sequence
  Description of Artificial Sequence: Synthetic probe
atcaccatcattatcctaatctttatctctaatactaaacctaaaaaacc

SEQ ID NO: 1641 - DNA, 50 bp, Artificial Sequence
  Description of Artificial Sequence: Synthetic probe
caacttaaaacaactacraaccccaaatctactctaaacttcaatcaatc

SEQ ID NO: 1642 - DNA, 50 bp, Artificial Sequence
  Description of Artificial Sequence: Synthetic probe
aaaaacatattccacactcataaaaataccacataaaacaatttactaac

SEQ ID NO: 1643 - DNA, 50 bp, Artificial Sequence
  Description of Artificial Sequence: Synthetic probe
cccaaatatatttactttaccaattaaaaatttcatctactaaactttcc

SEQ ID NO: 1644 - DNA, 50 bp, Artificial Sequence
  Description of Artificial Sequence: Synthetic probe
crtcrtcaatataacccrctattaatctacaaaaattccctcttcttatc

SEQ ID NO: 1645 - DNA, 50 bp, Artificial Sequence
  Description of Artificial Sequence: Synthetic probe
tctatccaccccctctactccrccctcaaaaaaatttcaaaaataaaaac

SEQ ID NO: 1646 - DNA, 50 bp, Artificial Sequence
  Description of Artificial Sequence: Synthetic probe
aaaaactcttaataccctttataaaatatcttcctattaatttacctaac

SEQ ID NO: 1647 - DNA, 50 bp, Artificial Sequence
  Description of Artificial Sequence: Synthetic probe
taacaataaaacrccrcaacractctcctcaaccaacaaataacaatttc

SEQ ID NO: 1648 - DNA, 50 bp, Artificial Sequence
  Description of Artificial Sequence: Synthetic probe
tattaatctacaaaaattccctcttcttatcraacccctacraaaccrac

SEQ ID NO: 1649 - DNA, 50 bp, Artificial Sequence
  Description of Artificial Sequence: Synthetic probe
attaattttaaaattttatttctataaaacaccaaaacaattttccaaac

SEQ ID NO: 1650 - DNA, 50 bp, Artificial Sequence
  Description of Artificial Sequence: Synthetic probe
tctcctaaaccattaccataaaattattataaacaacaccccrcaaatcc

SEQ ID NO: 1651 - DNA, 50 bp, Artificial Sequence
  Description of Artificial Sequence: Synthetic probe
accaacaaataacaatttcraattcacacraaaacraacrtaccatttcc

SEQ ID NO: 1652 - DNA, 50 bp, Artificial Sequence
  Description of Artificial Sequence: Synthetic probe
aaaaccataaaaaacttaaccaatcractaccrcatctacaaacrtacrc

SEQ ID NO: 1653 - DNA, 50 bp, Artificial Sequence
  Description of Artificial Sequence: Synthetic probe
actcaaaccccctaaaaattcctacaaattcctacattataaatatactc

SEQ ID NO: 1654 - DNA, 50 bp, Artificial Sequence
  Description of Artificial Sequence: Synthetic probe
aygtttgtattttttaggtgatggagagtatttttttaaggggattgaat

SEQ ID NO: 1655 - DNA, 50 bp, Artificial Sequence
  Description of Artificial Sequence: Synthetic probe
tctaataaaaacracaaaacaacaaacaacrctttaaatacataatatac

SEQ ID NO: 1656 - DNA, 50 bp, Artificial Sequence
  Description of Artificial Sequence: Synthetic probe
ttaaaaacaaataacratccctacraaccttatcctaattaactaaacac

SEQ ID NO: 1657 - DNA, 50 bp, Artificial Sequence
  Description of Artificial Sequence: Synthetic probe
atataaaatacracttcrctaatcctaacctaaatccaacraaaacrcac

SEQ ID NO: 1658 - DNA, 50 bp, Artificial Sequence
  Description of Artificial Sequence: Synthetic probe
caaaacctattaaataccaacaaaattactataaataacttaatccaaac

SEQ ID NO: 1659 - DNA, 50 bp, Artificial Sequence
  Description of Artificial Sequence: Synthetic probe
tacaattaatattttaactcaaataattcattattatcaaaaactatccc

SEQ ID NO: 1660 - DNA, 50 bp, Artificial Sequence
  Description of Artificial Sequence: Synthetic probe
ccttatcrctaaaaacracacataaaatctccraactttaatataaaaac

SEQ ID NO: 1661 - DNA, 50 bp, Artificial Sequence
  Description of Artificial Sequence: Synthetic probe
actatcatcaaaatcaaaaaaactcaatctaaaaaccttacactaaaaac

SEQ ID NO: 1662 - DNA, 50 bp, Artificial Sequence
  Description of Artificial Sequence: Synthetic probe
aatcactctaattaaaattatcttccaattcttcatctaaaacacaaccc

SEQ ID NO: 1663 - DNA, 50 bp, Artificial Sequence
  Description of Artificial Sequence: Synthetic probe
aaattaatcccrttcttattctccttccacccaaaaacaaatacaaaacc

SEQ ID NO: 1664 - DNA, 50 bp, Artificial Sequence
  Description of Artificial Sequence: Synthetic probe
aatccctctctctaacctaacactacrtcrctaacttaaaaacaaataac

SEQ ID NO: 1665 - DNA, 50 bp, Artificial Sequence
  Description of Artificial Sequence: Synthetic probe
tatttatattaaaygygtgtttagttaattaggataaggttygtagggat

SEQ ID NO: 1666 - DNA, 50 bp, Artificial Sequence
  Description of Artificial Sequence: Synthetic probe
acttatattaaacrcrtacccaaccaatcaaaacaaaacccrcaaaaacc

SEQ ID NO: 1667 - DNA, 50 bp, Artificial Sequence
  Description of Artificial Sequence: Synthetic probe
aaactcrataaaactaccaaatcraaaatattccaaaaatttcrcctccc

SEQ ID NO: 1668 - DNA, 50 bp, Artificial Sequence
  Description of Artificial Sequence: Synthetic probe
aatttataccacaaaactactacraacaataccrctacataactaacaac

SEQ ID NO: 1669 - DNA, 50 bp, Artificial Sequence
  Description of Artificial Sequence: Synthetic probe
ttctcaatatttcctatcccctcctaaaatccatacttaatcctcacatc

SEQ ID NO: 1670 - DNA, 50 bp, Artificial Sequence
  Description of Artificial Sequence: Synthetic probe
tgagatagtaaggataattttaattttaggttttggttgtgtaaggaagt

SEQ ID NO: 1671 - DNA, 50 bp, Artificial Sequence
  Description of Artificial Sequence: Synthetic probe
caaaccaaataaaaatctacactcttcaaaaaacctaaactactactcac

SEQ ID NO: 1672 - DNA, 50 bp, Artificial Sequence
  Description of Artificial Sequence: Synthetic probe
ttcctaatacatcrcctcaaccataaacaacrcraaattctttaataccc

SEQ ID NO: 1673 - DNA, 50 bp, Artificial Sequence
  Description of Artificial Sequence: Synthetic probe
ccacaataataccrttcttttctcaacatataactcaatattttttaaac

SEQ ID NO: 1674 - DNA, 50 bp, Artificial Sequence
  Description of Artificial Sequence: Synthetic probe
tatatccaaaaacccttaaatatcattcttaaaccttataaaaaacactc

SEQ ID NO: 1675 - DNA, 50 bp, Artificial Sequence
  Description of Artificial Sequence: Synthetic probe
atatgtttaaaggtttttgaatgttatttttgggttttgtaagaggtatt

SEQ ID NO: 1676 - DNA, 50 bp, Artificial Sequence
  Description of Artificial Sequence: Synthetic probe
tcaataaaccraaatctatccctttccaactcccaaaaccraatctaatc

SEQ ID NO: 1677 - DNA, 50 bp, Artificial Sequence
  Description of Artificial Sequence: Synthetic probe
taaaactctcacttctcaaaaccccaatatataaccatatcttcttaaac

SEQ ID NO: 1678 - DNA, 50 bp, Artificial Sequence
  Description of Artificial Sequence: Synthetic probe
tattcaataaataatactaaaataactaactaaccatatacaaaaaatca

SEQ ID NO: 1679 - DNA, 50 bp, Artificial Sequence
  Description of Artificial Sequence: Synthetic probe
tttattcraccttaaaactttactaatatactaaaaaacaaacaaccrac

SEQ ID NO: 1680 - DNA, 50 bp, Artificial Sequence
  Description of Artificial Sequence: Synthetic probe
cactaactaactactattattactacatcraaacccraatattcactaac

SEQ ID NO: 1681 - DNA, 50 bp, Artificial Sequence
  Description of Artificial Sequence: Synthetic probe
aacttaaaaaatttcttccatacataaaacattcaaccctcacaaaacac

SEQ ID NO: 1682 - DNA, 50 bp, Artificial Sequence
  Description of Artificial Sequence: Synthetic probe
ccccraaaaaaaatactcctatacaaccccactaaatcaactcatctatc

SEQ ID NO: 1683 - DNA, 50 bp, Artificial Sequence
  Description of Artificial Sequence: Synthetic probe
aatttctataaaaatccaaaacatctcctaacaatacaaaataacacaac

SEQ ID NO: 1684 - DNA, 50 bp, Artificial Sequence
  Description of Artificial Sequence: Synthetic probe
crtaattaaaactccaacrctacctctcctaatcrtaattaactaaaccc

SEQ ID NO: 1685 - DNA, 50 bp, Artificial Sequence
  Description of Artificial Sequence: Synthetic probe
tgaatagattaggttatttatatttaygtgagggttttaggagttatttt

SEQ ID NO: 1686 - DNA, 50 bp, Artificial Sequence
  Description of Artificial Sequence: Synthetic probe
ccaacttccacaccccttattcacacataatcattcttaccaccttaaac

SEQ ID NO: 1687 - DNA, 50 bp, Artificial Sequence
  Description of Artificial Sequence: Synthetic probe
ctattctccttccaaattctaaataaaatcaatccccaatctattattac

SEQ ID NO: 1688 - DNA, 50 bp, Artificial Sequence
  Description of Artificial Sequence: Synthetic probe
caatacraaactttaactccrattaaacracracccraaactcraaatac

SEQ ID NO: 1689 - DNA, 50 bp, Artificial Sequence
  Description of Artificial Sequence: Synthetic probe
aacttacraaaccraaaatatcctaaatctcraaaaaaccrcraaaaccc

SEQ ID NO: 1690 - DNA, 50 bp, Artificial Sequence
  Description of Artificial Sequence: Synthetic probe
actaaccrcraaacraaaacaaaaaacrctaaaaaccaaaccracctatc

SEQ ID NO: 1691 - DNA, 50 bp, Artificial Sequence
  Description of Artificial Sequence: Synthetic probe
aaacccctccaaattcaacratctcctaacctataatcacccacaaaaac

SEQ ID NO: 1692 - DNA, 50 bp, Artificial Sequence
  Description of Artificial Sequence: Synthetic probe
ctctaaactctaaaatccratccccatttaccracacccaccaaaaaaac

SEQ ID NO: 1693 - DNA, 50 bp, Artificial Sequence
  Description of Artificial Sequence: Synthetic probe
aaaatcraacraatacaaactccataaaccccaacttaatttcrattctc

SEQ ID NO: 1694 - DNA, 50 bp, Artificial Sequence
  Description of Artificial Sequence: Synthetic probe
aacaaaaaactaaaacccaacatacaaaaatcacratacaataaaacttc

SEQ ID NO: 1695 - DNA, 50 bp, Artificial Sequence
  Description of Artificial Sequence: Synthetic probe
aaaaaccacccctctaaacctacccaattcctcaaaaaactaatactaac

SEQ ID NO: 1696 - DNA, 50 bp, Artificial Sequence
  Description of Artificial Sequence: Synthetic probe
tcctaaaaccccaataaatatattcctctactaatatactctctctcaac

SEQ ID NO: 1697 - DNA, 50 bp, Artificial Sequence
  Description of Artificial Sequence: Synthetic probe
taaacrtatacccaaatctatacaaaccaaaaataatactcctacatttc

SEQ ID NO: 1698 - DNA, 50 bp, Artificial Sequence
  Description of Artificial Sequence: Synthetic probe
caaaacractctaaaaaccctatacrtcracttctaaactacctaaactc

SEQ ID NO: 1699 - DNA, 50 bp, Artificial Sequence
  Description of Artificial Sequence: Synthetic probe
tctcaccctttaacccaaaactactttaaatacaccaattactataaaac

SEQ ID NO: 1700 - DNA, 50 bp, Artificial Sequence
  Description of Artificial Sequence: Synthetic probe
tttgatgaaggttttttygtatttggtataatattttattgtgtgtttgg

SEQ ID NO: 1701 - DNA, 50 bp, Artificial Sequence
  Description of Artificial Sequence: Synthetic probe
attccaacaaaatcacatttactaccaaaactcctttacaaatattaatc

SEQ ID NO: 1702 - DNA, 50 bp, Artificial Sequence
  Description of Artificial Sequence: Synthetic probe
ctcraataaccaaacttatttcctcctcrataaatataaaatacracttc

SEQ ID NO: 1703 - DNA, 50 bp, Artificial Sequence
  Description of Artificial Sequence: Synthetic probe
tacaaataataaaaaatacccctttctacrccccatcrtatctaacctac

SEQ ID NO: 1704 - DNA, 50 bp, Artificial Sequence
  Description of Artificial Sequence: Synthetic probe
catacacttaaacaactcataccttacataaaaatacccatctaaaaaac

SEQ ID NO: 1705 - DNA, 50 bp, Artificial Sequence
  Description of Artificial Sequence: Synthetic probe
tattttaatttgaattttagggagtattggggtttggtttagtttagtta

SEQ ID NO: 1706 - DNA, 50 bp, Artificial Sequence
  Description of Artificial Sequence: Synthetic probe
attttaacttaaacttcaaaaaacattaaaacttaatttaatccaaccac

SEQ ID NO: 1707 - DNA, 50 bp, Artificial Sequence
  Description of Artificial Sequence: Synthetic probe
aaacatcatatctccatatcacrctataaaattctcaaaatatttcaaac

SEQ ID NO: 1708 - DNA, 50 bp, Artificial Sequence
  Description of Artificial Sequence: Synthetic probe
aacaaataaaaaatcatcaaaaaaactctccctacaaaataaccccaaac

SEQ ID NO: 1709 - DNA, 50 bp, Artificial Sequence
  Description of Artificial Sequence: Synthetic probe
tttaagggagtgtggtaaaattagagggtgtttagaaatagaaatttgat

SEQ ID NO: 1710 - DNA, 50 bp, Artificial Sequence
  Description of Artificial Sequence: Synthetic probe
acttcctcctccraaaacraacaaatctctaaatactaaacratcataac

SEQ ID NO: 1711 - DNA, 50 bp, Artificial Sequence
  Description of Artificial Sequence: Synthetic probe
attaataataaaactaataataaaactatatacttctaaactaaacatcc

SEQ ID NO: 1712 - DNA, 50 bp, Artificial Sequence
  Description of Artificial Sequence: Synthetic probe
aacaaaaccaaatctaaaactatcaaacctaaataccccttcacaaaaac

SEQ ID NO: 1713 - DNA, 50 bp, Artificial Sequence
  Description of Artificial Sequence: Synthetic probe
cctaaaaaaccaaaaatcccacttccctcaaaaaactactaaaacccccc

SEQ ID NO: 1714 - DNA, 50 bp, Artificial Sequence
  Description of Artificial Sequence: Synthetic probe
tatcaaccaataaccattatacraaaacaaaactacactaaccttttccc

SEQ ID NO: 1715 - DNA, 50 bp, Artificial Sequence
  Description of Artificial Sequence: Synthetic probe
ttgttagttataaagaatttaaaagaaaggattggtttaaagggtagggg

SEQ ID NO: 1716 - DNA, 50 bp, Artificial Sequence
  Description of Artificial Sequence: Synthetic probe
ccaactcaaaatttcrctctctttcaaaaaaaattccctcrtataaacrc

SEQ ID NO: 1717 - DNA, 50 bp, Artificial Sequence
  Description of Artificial Sequence: Synthetic probe
ggtgataagagtaattttttaygtgtgaatagggtgttagtttgtaaagt

SEQ ID NO: 1718 - DNA, 50 bp, Artificial Sequence
  Description of Artificial Sequence: Synthetic probe
ataacaaaaacaaccccttacrtataaataaaatactaatttacaaaatc

SEQ ID NO: 1719 - DNA, 50 bp, Artificial Sequence
  Description of Artificial Sequence: Synthetic probe
aaataacraaaataaacaatttccaaaaaattcattcctttaaaaactac

SEQ ID NO: 1720 - DNA, 50 bp, Artificial Sequence
  Description of Artificial Sequence: Synthetic probe
crcrtcttcataaataacaataaaaacaacatatacacaaaatatactcc

SEQ ID NO: 1721 - DNA, 50 bp, Artificial Sequence
  Description of Artificial Sequence: Synthetic probe
tttaaattatttctactcccacaaaataactatattcatttccctaaaac

SEQ ID NO: 1722 - DNA, 50 bp, Artificial Sequence
  Description of Artificial Sequence: Synthetic probe
acatcaacttatataaaccctctctacccacttaaaatataatactttac

SEQ ID NO: 1723 - DNA, 50 bp, Artificial Sequence
  Description of Artificial Sequence: Synthetic probe
ctacaataaaaaacrcacttattttccrtcracrtaattaaaactccaac

SEQ ID NO: 1724 - DNA, 50 bp, Artificial Sequence
  Description of Artificial Sequence: Synthetic probe
aaacaaaatttcatcatattaaccaaattaatcttaaactcctaacctca

SEQ ID NO: 1725 - DNA, 50 bp, Artificial Sequence
  Description of Artificial Sequence: Synthetic probe
caaaaacacttaccccaataaaaacrctcaaatcacaaattctcttaaac

SEQ ID NO: 1726 - DNA, 50 bp, Artificial Sequence
  Description of Artificial Sequence: Synthetic probe
ttcaaaataactctcctaaaaaataaaccaaaccctaccatataatacac

SEQ ID NO: 1727 - DNA, 50 bp, Artificial Sequence
  Description of Artificial Sequence: Synthetic probe
atttaggataatttttttgaggggtgagttaagttttgttatgtagtgta

SEQ ID NO: 1728 - DNA, 50 bp, Artificial Sequence
  Description of Artificial Sequence: Synthetic probe
aaactccaatttcaaacaaatctctccaaaaacractaaaacraataaac

SEQ ID NO: 1729 - DNA, 50 bp, Artificial Sequence
  Description of Artificial Sequence: Synthetic probe
aatttaaataaaatatcaaaacrctaacttttctacctaaaaatctaaac

SEQ ID NO: 1730 - DNA, 50 bp, Artificial Sequence
  Description of Artificial Sequence: Synthetic probe
ataaccacatacaaaactaaaccctccccaaaaccttaaaaatccaaacc

SEQ ID NO: 1731 - DNA, 50 bp, Artificial Sequence
  Description of Artificial Sequence: Synthetic probe
tatatcactatataaataaaacacaaaaacctaaactaaccaatctcacc

SEQ ID NO: 1732 - DNA, 50 bp, Artificial Sequence
  Description of Artificial Sequence: Synthetic probe
caataaccaattctattttcctcttaacaactttcaataaatatttacac

SEQ ID NO: 1733 - DNA, 50 bp, Artificial Sequence
  Description of Artificial Sequence: Synthetic probe
tctaacttttaaccataacaataacaccttacccttttaatttaaaaccc

SEQ ID NO: 1734 - DNA, 50 bp, Artificial Sequence
  Description of Artificial Sequence: Synthetic probe
ttcctaaaacctaatattttctcaacctcctaaatttttattccataacc

SEQ ID NO: 1735 - DNA, 50 bp, Artificial Sequence
  Description of Artificial Sequence: Synthetic probe
craaaataaaaataaaacctcrtctcctaaaactctactactccactcac

SEQ ID NO: 1736 - DNA, 50 bp, Artificial Sequence
  Description of Artificial Sequence: Synthetic probe
aattgtgtttyggatgyggttatatttagttgagatataggtgtttagaa

SEQ ID NO: 1737 - DNA, 50 bp, Artificial Sequence
  Description of Artificial Sequence: Synthetic probe
aaacaactcccraacctctataatccacaactttaacacattatctaccc

SEQ ID NO: 1738 - DNA, 50 bp, Artificial Sequence
  Description of Artificial Sequence: Synthetic probe
tttaaaataaaaattttcctaataccraattctataatcctaaacraatc

SEQ ID NO: 1739 - DNA, 50 bp, Artificial Sequence
  Description of Artificial Sequence: Synthetic probe
aacrtccaaataacccraaaaatcctctaaaaatacaaacccrcrcatac

SEQ ID NO: 1740 - DNA, 50 bp, Artificial Sequence
  Description of Artificial Sequence: Synthetic probe
taaacaacacaacaacttattccctcaccctaactaactaacttctctcc

SEQ ID NO: 1741 - DNA, 50 bp, Artificial Sequence
  Description of Artificial Sequence: Synthetic probe
aaaataaaaaataccccrccctttatacaaattaaaaaacrtatctaaac

SEQ ID NO: 1742 - DNA, 50 bp, Artificial Sequence
  Description of Artificial Sequence: Synthetic probe
aaacrataaataaactaactcaataaaactacacaaaaacacctcctccc

SEQ ID NO: 1743 - DNA, 50 bp, Artificial Sequence
  Description of Artificial Sequence: Synthetic probe
ccaaccttaaaacaaatcccctctcactcaatacraaaaaactaaacccc

SEQ ID NO: 1744 - DNA, 50 bp, Artificial Sequence
  Description of Artificial Sequence: Synthetic probe
ataaacraataaccctacaaaatactatactcaccaaactctccatccac

SEQ ID NO: 1745 - DNA, 50 bp, Artificial Sequence
  Description of Artificial Sequence: Synthetic probe
aatacaaaaattaaaacatactatatctacaaaaactcctaatcatttcc

SEQ ID NO: 1746 - DNA, 50 bp, Artificial Sequence
  Description of Artificial Sequence: Synthetic probe
aaaaaaaaaaatcttataaaaaaactacccctctctctcacaattataac

SEQ ID NO: 1747 - DNA, 50 bp, Artificial Sequence
  Description of Artificial Sequence: Synthetic probe
acttcctaactaaaaattcccactaacrtcraaaaaacatacaaacaaac

SEQ ID NO: 1748 - DNA, 50 bp, Artificial Sequence
  Description of Artificial Sequence: Synthetic probe
tattttttggttggaaatttttattgaygtygagagagtatatagataga

SEQ ID NO: 1749 - DNA, 50 bp, Artificial Sequence
  Description of Artificial Sequence: Synthetic probe
taactaaaattttaaactatataaattaataaatacaaacctaaaacccc

SEQ ID NO: 1750 - DNA, 50 bp, Artificial Sequence
  Description of Artificial Sequence: Synthetic probe
acattcaaaatatcaaattattatccaaaaaattaacaacattaatattc

SEQ ID NO: 1751 - DNA, 50 bp, Artificial Sequence
  Description of Artificial Sequence: Synthetic probe
ataattttcccaaaacttataaatcccaaatcctcattacaataataaac

SEQ ID NO: 1752 - DNA, 50 bp, Artificial Sequence
  Description of Artificial Sequence: Synthetic probe
cctcctctatctctacccttacaatattcatacaataccccaaatatacc

SEQ ID NO: 1753 - DNA, 50 bp, Artificial Sequence
  Description of Artificial Sequence: Synthetic probe
tttttagtataagaaaagggattagtatgtgttggtgagtattgtggtat

SEQ ID NO: 1754 - DNA, 50 bp, Artificial Sequence
  Description of Artificial Sequence: Synthetic probe
tattattaattcatttaaaaattcaaaaacaaacaaccctaaaattcatc

SEQ ID NO: 1755 - DNA, 50 bp, Artificial Sequence
  Description of Artificial Sequence: Synthetic probe
ctacactttcttttccatacaaatcrtatattaataaatatatcaaaatc

SEQ ID NO: 1756 - DNA, 50 bp, Artificial Sequence
  Description of Artificial Sequence: Synthetic probe
acaaaataaaaaataatccaaactatttttcactaatttaacaactctac

SEQ ID NO: 1757 - DNA, 50 bp, Artificial Sequence
  Description of Artificial Sequence: Synthetic probe
ataaaccttctttctctttaaccctcatttcattaactcctaattaaccc

SEQ ID NO: 1758 - DNA, 50 bp, Artificial Sequence
  Description of Artificial Sequence: Synthetic probe
ggtaaaatggaaggtggtttaagttgttttttattgatttggtaattttg

SEQ ID NO: 1759 - DNA, 50 bp, Artificial Sequence
  Description of Artificial Sequence: Synthetic probe
ttacaataaccaaaattctactacttcataaaaatattttatctttcatc

SEQ ID NO: 1760 - DNA, 50 bp, Artificial Sequence
  Description of Artificial Sequence: Synthetic probe
aatatttaatataaaaccctcaacacatctctcaaacaactatcaaaaac

SEQ ID NO: 1761 - DNA, 50 bp, Artificial Sequence
  Description of Artificial Sequence: Synthetic probe
aactaaaacccacracctcaaaacttcacacacaaacaaacctaaccaac

SEQ ID NO: 1762 - DNA, 50 bp, Artificial Sequence
  Description of Artificial Sequence: Synthetic probe
tatttctctttctccaaataatctccaccctatcacaaatttcctacacc

SEQ ID NO: 1763 - DNA, 50 bp, Artificial Sequence
  Description of Artificial Sequence: Synthetic probe
taattgtgtagatagttagaagtagtgaaaatttaggggttttggtgtaa

SEQ ID NO: 1764 - DNA, 50 bp, Artificial Sequence
  Description of Artificial Sequence: Synthetic probe
aaaaaatacaaccraaaaaataaacaaattataaaatactccrccrttcc

SEQ ID NO: 1765 - DNA, 50 bp, Artificial Sequence
  Description of Artificial Sequence: Synthetic probe
tcctcacrcatacataattttttccataataaaaaccataacatttatac

SEQ ID NO: 1766 - DNA, 50 bp, Artificial Sequence
  Description of Artificial Sequence: Synthetic probe
taaaatcrtacaaatatcataacttccaccataaaaaaaattatatatac

SEQ ID NO: 1767 - DNA, 50 bp, Artificial Sequence
  Description of Artificial Sequence: Synthetic probe
atttataaaaaactcccaaattaaatcaatattactaatcaacaacccac

SEQ ID NO: 1768 - DNA, 50 bp, Artificial Sequence
  Description of Artificial Sequence: Synthetic probe
cttataaaaccatcaaatccaaaaacatcaacaaccttatcacttacaac

SEQ ID NO: 1769 - DNA, 50 bp, Artificial Sequence
  Description of Artificial Sequence: Synthetic probe
tatttgtgagaaatttttaggttaggttagtgttgttgattagtagttta

SEQ ID NO: 1770 - DNA, 50 bp, Artificial Sequence
  Description of Artificial Sequence: Synthetic probe
aaaatttctcacaaatacaaaatatctacaccccatcctacacctacaac

SEQ ID NO: 1771 - DNA, 50 bp, Artificial Sequence
  Description of Artificial Sequence: Synthetic probe
tctacratctcttcaactaattctatcaaacacttctaacaatctaaaac

SEQ ID NO: 1772 - DNA, 50 bp, Artificial Sequence
  Description of Artificial Sequence: Synthetic probe
tctcttcaactaattctatcaaacacttctaacaatctaaaacracaacc

SEQ ID NO: 1773 - DNA, 50 bp, Artificial Sequence
  Description of Artificial Sequence: Synthetic probe
gtttttttagttagttttattaggtatttttggtaatttggagyggtagt

SEQ ID NO: 1774 - DNA, 50 bp, Artificial Sequence
  Description of Artificial Sequence: Synthetic probe
actaattctatcaaacacttctaacaatctaaaacracaaccractaaac

SEQ ID NO: 1775 - DNA, 50 bp, Artificial Sequence
  Description of Artificial Sequence: Synthetic probe
aattctatcaaacacttctaacaatctaaaacracaaccractaaacrac

SEQ ID NO: 1776 - DNA, 50 bp, Artificial Sequence
  Description of Artificial Sequence: Synthetic probe
aaaaactacaactaccractacrtatactaaaaaacraaatccrtacaac

SEQ ID NO: 1777 - DNA, 50 bp, Artificial Sequence
  Description of Artificial Sequence: Synthetic probe
crtccracrcttaatttaataacaccrcratcttaaaaactacaactacc

SEQ ID NO: 1778 - DNA, 50 bp, Artificial Sequence
  Description of Artificial Sequence: Synthetic probe
taaatatcaatattttataattttcaaatatacaaatctttcacctcctc

SEQ ID NO: 1779 - DNA, 50 bp, Artificial Sequence
  Description of Artificial Sequence: Synthetic probe
acaaaaaaacatttaccacatctaacctttccaaatatataaaaattacc

SEQ ID NO: 1780 - DNA, 50 bp, Artificial Sequence
  Description of Artificial Sequence: Synthetic probe
aacacatttaacratttaaaaattcccatcacrctttaaaaaaatatacc

SEQ ID NO: 1781 - DNA, 50 bp, Artificial Sequence
  Description of Artificial Sequence: Synthetic probe
aactaaaaacaactttctcacattatacacrcaaatctcctataaacrcc

SEQ ID NO: 1782 - DNA, 50 bp, Artificial Sequence
  Description of Artificial Sequence: Synthetic probe
ggatatatttagygatttggagatttttattaygttttgggaggatgtat

SEQ ID NO: 1783 - DNA, 50 bp, Artificial Sequence
  Description of Artificial Sequence: Synthetic probe
aaaaaaacraaataacaaaacacatttaacratttaaaaattcccatcac

SEQ ID NO: 1784 - DNA, 50 bp, Artificial Sequence
  Description of Artificial Sequence: Synthetic probe
cacttcctacaattttaaaatacaaaaactatacaccccttaaaaaatac

SEQ ID NO: 1785 - DNA, 50 bp, Artificial Sequence
  Description of Artificial Sequence: Synthetic probe
acttcctacaattttaaaatacaaaaactatacaccccttaaaaaataca

SEQ ID NO: 1786 - DNA, 50 bp, Artificial Sequence
  Description of Artificial Sequence: Synthetic probe
tgatagggaatagggataaatataggaaggttagtattgaaagaagttgg

SEQ ID NO: 1787 - DNA, 50 bp, Artificial Sequence
  Description of Artificial Sequence: Synthetic probe
tcttaattattataaaaactccatataaaaaatacrtaaacattatcctc

SEQ ID NO: 1788 - DNA, 50 bp, Artificial Sequence
  Description of Artificial Sequence: Synthetic probe
agttaatatgtattgaatgattatgtattaggtatygaggataatgttta

SEQ ID NO: 1789 - DNA, 50 bp, Artificial Sequence
  Description of Artificial Sequence: Synthetic probe
actaacatatattaaataattatacactaaacatcraaaataatatttac

SEQ ID NO: 1790 - DNA, 50 bp, Artificial Sequence
  Description of Artificial Sequence: Synthetic probe
cctaaacacaatataacaattaaaaaatcttcattaatttataaactcac

SEQ ID NO: 1791 - DNA, 50 bp, Artificial Sequence
  Description of Artificial Sequence: Synthetic probe
ttaaaacaatttctcaataatattcttaacataataccacattattatac

SEQ ID NO: 1792 - DNA, 50 bp, Artificial Sequence
  Description of Artificial Sequence: Synthetic probe
caaaatatttttctctactataactaaactataaattccttatcatcctc

SEQ ID NO: 1793 - DNA, 50 bp, Artificial Sequence
  Description of Artificial Sequence: Synthetic probe
gttagaatagttttttagtgatgtttttggtatgatgttatattgttgta

SEQ ID NO: 1794 - DNA, 50 bp, Artificial Sequence
  Description of Artificial Sequence: Synthetic probe
cctttaaaaaacattctatcactattctccccaaatttttaacttaattc

SEQ ID NO: 1795 - DNA, 50 bp, Artificial Sequence
  Description of Artificial Sequence: Synthetic probe
atttcttcaaataatcaatccaaatatttaacctcttaattaccacctcc

SEQ ID NO: 1796 - DNA, 50 bp, Artificial Sequence
  Description of Artificial Sequence: Synthetic probe
aatctctcctttttttccaattatcttatacatttaaaccttaaccccac

SEQ ID NO: 1797 - DNA, 50 bp, Artificial Sequence
  Description of Artificial Sequence: Synthetic probe
cttatctaacacctctcctactctcaataatttacctaatatcataatcc

SEQ ID NO: 1798 - DNA, 50 bp, Artificial Sequence
  Description of Artificial Sequence: Synthetic probe
aataaaattaactaaaaaaaaccataataatcaaaaactcaaacacttcc

SEQ ID NO: 1799 - DNA, 50 bp, Artificial Sequence
  Description of Artificial Sequence: Synthetic probe
aattctcaatataaaataacaattcattaatattctaaactaaaaccaac

SEQ ID NO: 1800 - DNA, 50 bp, Artificial Sequence
  Description of Artificial Sequence: Synthetic probe
ccatataatctacattcaacactaaccaacaaaaaaatttaaaacttacc

SEQ ID NO: 1801 - DNA, 50 bp, Artificial Sequence
  Description of Artificial Sequence: Synthetic probe
aaaaatattccctaataaactttctaaatactaatctccatccctaaatc

SEQ ID NO: 1802 - DNA, 50 bp, Artificial Sequence
  Description of Artificial Sequence: Synthetic probe
aaaaataattcctcaaaaacctataataattccaatacaaacaaaaaaac

SEQ ID NO: 1803 - DNA, 50 bp, Artificial Sequence
  Description of Artificial Sequence: Synthetic probe
taaaagtagttttttaaaagtttgtgatggttttagtatagataggaaga

SEQ ID NO: 1804 - DNA, 50 bp, Artificial Sequence
  Description of Artificial Sequence: Synthetic probe
cctatctatactaaaaccatcacaaacttttaaaaaactacttttaaacc

SEQ ID NO: 1805 - DNA, 50 bp, Artificial Sequence
  Description of Artificial Sequence: Synthetic probe
aacctttaaatcacatcattttcatttaacaatctttatcaataattccc

SEQ ID NO: 1806 - DNA, 50 bp, Artificial Sequence
  Description of Artificial Sequence: Synthetic probe
aaactttcataccattactacctcactctcatacttccrtttaaacctcc

SEQ ID NO: 1807 - DNA, 50 bp, Artificial Sequence
  Description of Artificial Sequence: Synthetic probe
tccaattcttataatattttctaaccaaaatctataccaaacaaataaac

SEQ ID NO: 1808 - DNA, 50 bp, Artificial Sequence
  Description of Artificial Sequence: Synthetic probe
ttttagtttttatggtgttttttgattaggatttgtattaagtagatgaa

SEQ ID NO: 1809 - DNA, 50 bp, Artificial Sequence
  Description of Artificial Sequence: Synthetic probe
ttttctaaccaaaatctataccaaacaaataaacrtaccaaaatatcttc

SEQ ID NO: 1810 - DNA, 50 bp, Artificial Sequence
  Description of Artificial Sequence: Synthetic probe
aaaatatcttcrttctccctaactacacatcctcctataatcttcatacc

SEQ ID NO: 1811 - DNA, 50 bp, Artificial Sequence
  Description of Artificial Sequence: Synthetic probe
aatttaaatatccctaaacaattacatcctatttaatcctatataaaaac

SEQ ID NO: 1812 - DNA, 50 bp, Artificial Sequence
  Description of Artificial Sequence: Synthetic probe
taagttggtgttttagttagtgaaatttttatgtaaggaaaggattgaaa

SEQ ID NO: 1813 - DNA, 50 bp, Artificial Sequence
  Description of Artificial Sequence: Synthetic probe
ataaaaataaaaaaccaactctaaatcctaaacatctaactttaatactc

SEQ ID NO: 1814 - DNA, 50 bp, Artificial Sequence
  Description of Artificial Sequence: Synthetic probe
atttctttcactacaatttcaatatttaaaaatttcaaatttactttaac

SEQ ID NO: 1815 - DNA, 50 bp, Artificial Sequence
  Description of Artificial Sequence: Synthetic probe
caacattttcctaacrtttaaaaaatattatttaaccaacttctctatac

SEQ ID NO: 1816 - DNA, 50 bp, Artificial Sequence
  Description of Artificial Sequence: Synthetic probe
cracccaaataaccatctttcttaccactcatccacaaaactcacaaaac

SEQ ID NO: 1817 - DNA, 50 bp, Artificial Sequence
  Description of Artificial Sequence: Synthetic probe
cacrctattaccaacctaaaaaaacatctcaatattttaaacaacttctc

SEQ ID NO: 1818 - DNA, 50 bp, Artificial Sequence
  Description of Artificial Sequence: Synthetic probe
tcccatatcttaattactcataaaactatactaccacaaacccatttttc

SEQ ID NO: 1819 - DNA, 50 bp, Artificial Sequence
  Description of Artificial Sequence: Synthetic probe
ataacaacrtaacttaaaataaatcctccaacttttctaactttctcacc

SEQ ID NO: 1820 - DNA, 50 bp, Artificial Sequence
  Description of Artificial Sequence: Synthetic probe
tctctttcraattaactccaacaaaatttctacactaaaaacctttcatc

SEQ ID NO: 1821 - DNA, 50 bp, Artificial Sequence
  Description of Artificial Sequence: Synthetic probe
cttaacttcacttccccctaactaccatccaaatccttaaattctctttc

SEQ ID NO: 1822 - DNA, 50 bp, Artificial Sequence
  Description of Artificial Sequence: Synthetic probe
gtgattttygatgaaaggtttttagtgtagaaattttgttggagttaatt

SEQ ID NO: 1823 - DNA, 50 bp, Artificial Sequence
  Description of Artificial Sequence: Synthetic probe
taaccttcrataaaaaatttccaatacaaaaaccttattaaaaccaaccc

SEQ ID NO: 1824 - DNA, 50 bp, Artificial Sequence
  Description of Artificial Sequence: Synthetic probe
aatcataaatataaaataaaacctctcaatataactattaactttccttc

SEQ ID NO: 1825 - DNA, 50 bp, Artificial Sequence
  Description of Artificial Sequence: Synthetic probe
tccaactataatcctactctctccctatatttattcaactaactataacc

SEQ ID NO: 1826 - DNA, 50 bp, Artificial Sequence
  Description of Artificial Sequence: Synthetic probe
cccctcacrccccttatatcttcaattctctatcaaacttaaactatctc

SEQ ID NO: 1827 - DNA, 50 bp, Artificial Sequence
  Description of Artificial Sequence: Synthetic probe
ctcaatttcttcctcaataaaaaatccrcaaattcatcrtaacccctcac

SEQ ID NO: 1828 - DNA, 50 bp, Artificial Sequence
  Description of Artificial Sequence: Synthetic probe
aaattatctttctatactttcctctcaatttcttcctcaataaaaaatcc

SEQ ID NO: 1829 - DNA, 50 bp, Artificial Sequence
  Description of Artificial Sequence: Synthetic probe
atccctttaaaataatatacctctaacaatatataaaaaccaaaaacaac

SEQ ID NO: 1830 - DNA, 50 bp, Artificial Sequence
  Description of Artificial Sequence: Synthetic probe
aaaacatctattccccaaaactccatcctctcttctaaataacaaaaaac

SEQ ID NO: 1831 - DNA, 50 bp, Artificial Sequence
  Description of Artificial Sequence: Synthetic probe
atttttcaaaaccataaaactactctttcttccaacccataaactcctcc

SEQ ID NO: 1832 - DNA, 50 bp, Artificial Sequence
  Description of Artificial Sequence: Synthetic probe
aatcaaacctaacatctaaatacaatatataactctcaactaaatcctac

SEQ ID NO: 1833 - DNA, 50 bp, Artificial Sequence
  Description of Artificial Sequence: Synthetic probe
crttttacattcaaccaaaaaatcaaaaacaccaatataaaactcaatcc

SEQ ID NO: 1834 - DNA, 50 bp, Artificial Sequence
  Description of Artificial Sequence: Synthetic probe
aaaaaaataataaacataacaaataacaaactaacacttaatttccaatc

SEQ ID NO: 1835 - DNA, 50 bp, Artificial Sequence
  Description of Artificial Sequence: Synthetic probe
aaaatttactttaacaaataaccaataaatcaaaatattataccacttcc

SEQ ID NO: 1836 - DNA, 50 bp, Artificial Sequence
  Description of Artificial Sequence: Synthetic probe
ataaataatataaataactactaactaactctttacctccaatcttaacc

SEQ ID NO: 1837 - DNA, 50 bp, Artificial Sequence
  Description of Artificial Sequence: Synthetic probe
rccctactctactattaacccacrctaaaaaccaatactttcrtaaaaac

SEQ ID NO: 1838 - DNA, 50 bp, Artificial Sequence
  Description of Artificial Sequence: Synthetic probe
tgtgggaatggaggatagattatatttatagaaagaaattttagggtttg

SEQ ID NO: 1839 - DNA, 50 bp, Artificial Sequence
  Description of Artificial Sequence: Synthetic probe
aaaaaataaactatatttacaaaaaaaaatcctaaaacctacrtcctcac

SEQ ID NO: 1840 - DNA, 50 bp, Artificial Sequence
  Description of Artificial Sequence: Synthetic probe
aaaaatctacaaccataaaccaactccrccctactctactattaacccac

SEQ ID NO: 1841 - DNA, 50 bp, Artificial Sequence
  Description of Artificial Sequence: Synthetic probe
atagaaagaaattttagggtttgygtttttaygaaagtattggtttttag

SEQ ID NO: 1842 - DNA, 50 bp, Artificial Sequence
  Description of Artificial Sequence: Synthetic probe
caaaaaaaaatcctaaaacctacrtcctcacraaaacattaacctccaac

SEQ ID NO: 1843 - DNA, 50 bp, Artificial Sequence
  Description of Artificial Sequence: Synthetic probe
tcttatctaaaaaaaactaacacaaaaatctacaaccataaaccaactcc

SEQ ID NO: 1844 - DNA, 50 bp, Artificial Sequence
  Description of Artificial Sequence: Synthetic probe
rtcctcacraaaacattaacctccaacrtaaactaacaacaaaacaaaac

SEQ ID NO: 1845 - DNA, 50 bp, Artificial Sequence
  Description of Artificial Sequence: Synthetic probe
acaccttacatttaccctccaattctacccataactaatacaaaatatac

SEQ ID NO: 1846 - DNA, 50 bp, Artificial Sequence
  Description of Artificial Sequence: Synthetic probe
ctttaataccccaaaatctattaaatcacataaccaaaacactaccacac

SEQ ID NO: 1847 - DNA, 50 bp, Artificial Sequence
  Description of Artificial Sequence: Synthetic probe
acccaaaacaaacctaaaatccrcaactattctaaactatcatatcaacc

SEQ ID NO: 1848 - DNA, 50 bp, Artificial Sequence
  Description of Artificial Sequence: Synthetic probe
tcacaaaatatatttcccactctctaaaatacatttatcttaccaatacc

SEQ ID NO: 1849 - DNA, 50 bp, Artificial Sequence
  Description of Artificial Sequence: Synthetic probe
atataataaaaatattctaaattaataataaacaacaatcaccatctttc

SEQ ID NO: 1850 - DNA, 50 bp, Artificial Sequence
  Description of Artificial Sequence: Synthetic probe
tataataaaaatattctaaattaataataaacaacaatcaccatctttca

SEQ ID NO: 1851 - DNA, 50 bp, Artificial Sequence
  Description of Artificial Sequence: Synthetic probe
aactcaaccaaaaaataactataattacaactattatacctaattaacac

SEQ ID NO: 1852 - DNA, 50 bp, Artificial Sequence
  Description of Artificial Sequence: Synthetic probe
aaatacraactacaaattaaaataaaaaccctaaatctacacctcttacc

SEQ ID NO: 1853 - DNA, 50 bp, Artificial Sequence
  Description of Artificial Sequence: Synthetic probe
tacttaaccattaacaaaatccccacataattctttaatctataaaatac

SEQ ID NO: 1854 - DNA, 50 bp, Artificial Sequence
  Description of Artificial Sequence: Synthetic probe
ctttacrataaaaaatataaattcaaaacttccacttcaatctataactc

SEQ ID NO: 1855 - DNA, 50 bp, Artificial Sequence
  Description of Artificial Sequence: Synthetic probe
aaatttaaaaaatacttaaaacatttaaccaatcttcatataactaaatc

SEQ ID NO: 1856 - DNA, 50 bp, Artificial Sequence
  Description of Artificial Sequence: Synthetic probe
tgaggttttgaatagatgaattataagtttgagaggattattaggatgtt

SEQ ID NO: 1857 - DNA, 50 bp, Artificial Sequence
  Description of Artificial Sequence: Synthetic probe
taaactataaaccctaaaatctcaacaaaattaataaactctttccctcc

SEQ ID NO: 1858 - DNA, 50 bp, Artificial Sequence
  Description of Artificial Sequence: Synthetic probe
aaaaaaaataaaaccaaaatcaaaactttaccattaaattctttaccatc

SEQ ID NO: 1859 - DNA, 50 bp, Artificial Sequence
  Description of Artificial Sequence: Synthetic probe
tagggaggatgaagttaaggttagaattttgttattgagttttttgttat

SEQ ID NO: 1860 - DNA, 50 bp, Artificial Sequence
  Description of Artificial Sequence: Synthetic probe
ttattattttcaaaaatactataatttctccaaaataactataataactc

SEQ ID NO: 1861 - DNA, 50 bp, Artificial Sequence
  Description of Artificial Sequence: Synthetic probe
attgttgtttttagagatgttgtgatttttttaaagtggttgtgatggtt

SEQ ID NO: 1862 - DNA, 50 bp, Artificial Sequence
  Description of Artificial Sequence: Synthetic probe
tataattaaaaatcaaaattacaaaaatcaatcccataaaaaaaataacc

SEQ ID NO: 1863 - DNA, 50 bp, Artificial Sequence
  Description of Artificial Sequence: Synthetic probe
aacaacaaaaaataaaaacacaactaaaacatacatttctacttttatcc

SEQ ID NO: 1864 - DNA, 50 bp, Artificial Sequence
  Description of Artificial Sequence: Synthetic probe
caaataactccctaaaaataaaaaactttctatttatttctcctctacac

SEQ ID NO: 1865 - DNA, 50 bp, Artificial Sequence
  Description of Artificial Sequence: Synthetic probe
ttttgtataattaggtattagtaggtttttataaaggaattyggttgtta

SEQ ID NO: 1866 - DNA, 50 bp, Artificial Sequence
  Description of Artificial Sequence: Synthetic probe
attctatccaaaacattcacaatatctctataaccaaaatcttttttatc

SEQ ID NO: 1867 - DNA, 50 bp, Artificial Sequence
  Description of Artificial Sequence: Synthetic probe
craaactataaataactctactcttatcacctaacacacaaaattctatc

SEQ ID NO: 1868 - DNA, 50 bp, Artificial Sequence
  Description of Artificial Sequence: Synthetic probe
actataaataactctactcttatcacctaacacacaaaattctatcrtac

SEQ ID NO: 1869 - DNA, 50 bp, Artificial Sequence
  Description of Artificial Sequence: Synthetic probe
actactacattacttaatatattactttaactaaaaaaatatttataacc

SEQ ID NO: 1870 - DNA, 50 bp, Artificial Sequence
  Description of Artificial Sequence: Synthetic probe
aaatatttcctttttccaatatttttcattttataatattccataataca

SEQ ID NO: 1871 - DNA, 50 bp, Artificial Sequence
  Description of Artificial Sequence: Synthetic probe
atcaaaatatatcatttcttcacctaaaacactccaataactccacttca

SEQ ID NO: 1872 - DNA, 50 bp, Artificial Sequence
  Description of Artificial Sequence: Synthetic probe
ataccctcatatactcaaatacctaacattctaaaaacttcacaaaacca

SEQ ID NO: 1873 - DNA, 50 bp, Artificial Sequence
  Description of Artificial Sequence: Synthetic probe
aaccatcctaactaacacaataaaacccatctctacaaaaaaattaacca

SEQ ID NO: 1874 - DNA, 50 bp, Artificial Sequence
  Description of Artificial Sequence: Synthetic probe
atcctaactaacacaataaaacccatctctacaaaaaaattaaccaaaca

SEQ ID NO: 1875 - DNA, 50 bp, Artificial Sequence
  Description of Artificial Sequence: Synthetic probe
taacacaataaaacccatctctacaaaaaaattaaccaaacataataaca

SEQ ID NO: 1876 - DNA, 50 bp, Artificial Sequence
  Description of Artificial Sequence: Synthetic probe
aaaaaaattaaccaaacataataacaaacatctataatctcaactactca

SEQ ID NO: 1877 - DNA, 50 bp, Artificial Sequence
  Description of Artificial Sequence: Synthetic probe
aaaaaaataacataaacccaaaacacaaaacttacaataaaccaaaatca

SEQ ID NO: 1878 - DNA, 50 bp, Artificial Sequence
  Description of Artificial Sequence: Synthetic probe
aatattaaaaattccccatctccccaaaatttctctttctctcccaaccc

SEQ ID NO: 1879 - DNA, 50 bp, Artificial Sequence
  Description of Artificial Sequence: Synthetic probe
atattaaaaattccccatctccccaaaatttctctttctctcccaaccca

SEQ ID NO: 1880 - DNA, 50 bp, Artificial Sequence
  Description of Artificial Sequence: Synthetic probe
raaataaatttcraatccraaaactctaaaaaacccraacratccrtaac

SEQ ID NO: 1881 - DNA, 50 bp, Artificial Sequence
  Description of Artificial Sequence: Synthetic probe
aaataaatttcaaatccaaaaactctaaaaaacccaaacaatccataaca

SEQ ID NO: 1882 - DNA, 50 bp, Artificial Sequence
  Description of Artificial Sequence: Synthetic probe
atcccactacctcaaaataaatttcaaatccaaaaactctaaaaaaccca

SEQ ID NO: 1883 - DNA, 50 bp, Artificial Sequence
  Description of Artificial Sequence: Synthetic probe
aaatcacaaaacccaaaactattaaaaaactcaaaaaaaaccacaaatca

SEQ ID NO: 1884 - DNA, 50 bp, Artificial Sequence
  Description of Artificial Sequence: Synthetic probe
ttaaatatattgagtgtgaggtagagaataaaatttgagagaaaagttat

SEQ ID NO: 1885 - DNA, 50 bp, Artificial Sequence
  Description of Artificial Sequence: Synthetic probe
ctaaccataaaaccaccctaaaatactaaaccctaaacttctaccctaca

SEQ ID NO: 1886 - DNA, 50 bp, Artificial Sequence; identical to SEQ ID NO: 1885
  Description of Artificial Sequence: Synthetic probe

SEQ ID NO: 1887 - DNA, 50 bp, Artificial Sequence; identical to SEQ ID NO: 1885
  Description of Artificial Sequence: Synthetic probe

SEQ ID NO: 1888 - DNA, 50 bp, Artificial Sequence; identical to SEQ ID NO: 1885
  Description of Artificial Sequence: Synthetic probe

SEQ ID NO: 1889 - DNA, 50 bp, Artificial Sequence
  Description of Artificial Sequence: Synthetic probe
aaaccaccctaaaatactaaaccctaaacttctaccctacaaaaatcaca

SEQ ID NO: 1890 - DNA, 50 bp, Artificial Sequence
  Description of Artificial Sequence: Synthetic probe
aaactctatatcctaaatctattcctccccatcccactaccaaatcaaca

SEQ ID NO: 1891 - DNA, 50 bp, Artificial Sequence
  Description of Artificial Sequence: Synthetic probe
tactaaaccctaaacttctaccctacaaaaatcacactaacctaacaaca

SEQ ID NO: 1892 - DNA, 50 bp, Artificial Sequence
  Description of Artificial Sequence: Synthetic probe
aaaactccaaaaaaactcctactttccctaaaaaaaaacataacccctca

SEQ ID NO: 1893 - DNA, 50 bp, Artificial Sequence
  Description of Artificial Sequence: Synthetic probe
cacaaaaaaactatctcacactataaaaaaaatattcataaacaaattca

SEQ ID NO: 1894 - DNA, 50 bp, Artificial Sequence
  Description of Artificial Sequence: Synthetic probe
aaacataaaataaactatttaaaatattacctctcactataactaataca

SEQ ID NO: 1895 - DNA, 50 bp, Artificial Sequence
  Description of Artificial Sequence: Synthetic probe
aaactaaaaaacaaaatatcaatataacaaaattacacttatacctcaca

SEQ ID NO: 1896 - DNA, 50 bp, Artificial Sequence
  Description of Artificial Sequence: Synthetic probe
gattttaattttggtggtaataattaaagtattgtagttaggagttagtt

SEQ ID NO: 1897 - DNA, 50 bp, Artificial Sequence
  Description of Artificial Sequence: Synthetic probe
atcccaattttaataacaacaaccaaaacatcataatcaaaaaccaatca

SEQ ID NO: 1898 - DNA, 50 bp, Artificial Sequence
  Description of Artificial Sequence: Synthetic probe
taaagttaatattttgatttagtttgatggagagaggaaggtatatgttt

SEQ ID NO: 1899 - DNA, 50 bp, Artificial Sequence
  Description of Artificial Sequence: Synthetic probe
aacttatttctcctaaaaatactcttccaaaaatatttaaactacctcca

SEQ ID NO: 1900 - DNA, 50 bp, Artificial Sequence
  Description of Artificial Sequence: Synthetic probe
caatcaaaaatcttaatctaaacccttttcataaaataataccaaaaaca

SEQ ID NO: 1901 - DNA, 50 bp, Artificial Sequence
  Description of Artificial Sequence: Synthetic probe
agaagttataatatttgtatattgttggtgagagtgtatagtggtatagt

SEQ ID NO: 1902 - DNA, 50 bp, Artificial Sequence
  Description of Artificial Sequence: Synthetic probe
aaaatcacaacacttatacactactaataaaaatatacaataatacaaca

SEQ ID NO: 1903 - DNA, 50 bp, Artificial Sequence
  Description of Artificial Sequence: Synthetic probe
attcacttttaaaactaaataatattccatactatatacaccataaatca

SEQ ID NO: 1904 - DNA, 50 bp, Artificial Sequence
  Description of Artificial Sequence: Synthetic probe
acctcaacccttttctttcctaaacacaataaaacctcaatctctcacca

SEQ ID NO: 1905 - DNA, 50 bp, Artificial Sequence
  Description of Artificial Sequence: Synthetic probe
tctaaaaaaaattaacatataaataactaaacaaaaaaaatcctctctca

SEQ ID NO: 1906 - DNA, 50 bp, Artificial Sequence
  Description of Artificial Sequence: Synthetic probe
ttttattctatctaaacccctaaataattaaattataactacccacaaca

SEQ ID NO: 1907 - DNA, 50 bp, Artificial Sequence
  Description of Artificial Sequence: Synthetic probe
ttaagggatgtttagatagttggtataatattatttttgggtgtgtttgt

SEQ ID NO: 1908 - DNA, 50 bp, Artificial Sequence
  Description of Artificial Sequence: Synthetic probe
taaaaaatacctaaataactaatataacattatttctaaatatacctaca

SEQ ID NO: 1909 - DNA, 50 bp, Artificial Sequence
  Description of Artificial Sequence: Synthetic probe
aaaaattaaaactaaaataaactataatcataccactaccctccaaacca

SEQ ID NO: 1910 - DNA, 50 bp, Artificial Sequence
  Description of Artificial Sequence: Synthetic probe
aaactctatataaaatttacatacttttttaaccaacataataactcaca

SEQ ID NO: 1911 - DNA, 50 bp, Artificial Sequence
  Description of Artificial Sequence: Synthetic probe
aattttccatattataaactctatataaaatttacatacttttttaacca

SEQ ID NO: 1912 - DNA, 50 bp, Artificial Sequence
  Description of Artificial Sequence: Synthetic probe
taataaaaacaaaattttaccatattaaccaatctaatctcaaactccca

SEQ ID NO: 1913 - DNA, 50 bp, Artificial Sequence
  Description of Artificial Sequence: Synthetic probe
aacaaaaacaaaaacaaaccaccaccaacaaaataaaaatcaacaccaca

SEQ ID NO: 1914 - DNA, 50 bp, Artificial Sequence
  Description of Artificial Sequence: Synthetic probe
aaccttcctaaactcaatataactattaatccctaaaactatcctttaca

SEQ ID NO: 1915 - DNA, 50 bp, Artificial Sequence
  Description of Artificial Sequence: Synthetic probe
atccaactccttccttcaactaaaaaaaacaaataaataaatcaactaca

SEQ ID NO: 1916 - DNA, 50 bp, Artificial Sequence
  Description of Artificial Sequence: Synthetic probe
cacaacaaaaaaactaacaataactctaaaaacaccatacacctcataca

SEQ ID NO: 1917 - DNA, 50 bp, Artificial Sequence
  Description of Artificial Sequence: Synthetic probe
tttaattcctaattcctaactcaacaaccatttccaaaactattcttaca

SEQ ID NO: 1918 - DNA, 50 bp, Artificial Sequence
  Description of Artificial Sequence: Synthetic probe
ccttaatataactactatttacctaaatattcactttataaaaatccaca

SEQ ID NO: 1919 - DNA, 50 bp, Artificial Sequence
  Description of Artificial Sequence: Synthetic probe
tctctccactattaataaacatttatattatattcaaaatctacaaatca

SEQ ID NO: 1920 - DNA, 50 bp, Artificial Sequence
  Description of Artificial Sequence: Synthetic probe
ccaaatatcctaaaattaccaataattctaaatactcaatatctaaaaca

SEQ ID NO: 1921 - DNA, 50 bp, Artificial Sequence
  Description of Artificial Sequence: Synthetic probe
tatataacatataattcttattctacatcaaacctccttcccaccctcca

SEQ ID NO: 1922 - DNA, 50 bp, Artificial Sequence
  Description of Artificial Sequence: Synthetic probe
taataaccctaacaacacatcctctttcctatatcaaaaaacatcatcca

SEQ ID NO: 1923 - DNA, 50 bp, Artificial Sequence
  Description of Artificial Sequence: Synthetic probe
ctccctaattcttcaattctaaaaaaaactatcttcttctcacctcccca

SEQ ID NO: 1924 - DNA, 50 bp, Artificial Sequence
  Description of Artificial Sequence: Synthetic probe
aacataataaccctaacaacacatcctctttcctatatcaaaaaacatca

SEQ ID NO: 1925 - DNA, 50 bp, Artificial Sequence
  Description of Artificial Sequence: Synthetic probe
ctaattcttcaattctaaaaaaaactatcttcttctcacctccccaaaca

SEQ ID NO: 1926 - DNA, 50 bp, Artificial Sequence
  Description of Artificial Sequence: Synthetic probe
taaactcatctccataacccaaactttactttcctcrcaataactcaaac

SEQ ID NO: 1927 - DNA, 50 bp, Artificial Sequence
  Description of Artificial Sequence: Synthetic probe
cratcrctaaaataaaaccaaataacaaaaaatttctaataaaccttcrc

SEQ ID NO: 1928 - DNA, 50 bp, Artificial Sequence
  Description of Artificial Sequence: Synthetic probe
tcrtaattaaccctaaactacraacrccaattttcattaaataaacratc

SEQ ID NO: 1929 - DNA, 50 bp, Artificial Sequence
  Description of Artificial Sequence: Synthetic probe
tcaaaactcctccaaccctattttaatcccacaaccactactttaatctc

SEQ ID NO: 1930 - DNA, 50 bp, Artificial Sequence
  Description of Artificial Sequence: Synthetic probe
tttgtatagtgatttaggttgaattttgtgtagtgatttaggttgaaagt

SEQ ID NO: 1931 - DNA, 50 bp, Artificial Sequence
  Description of Artificial Sequence: Synthetic probe
ctatacaataatctaaactaaatcttatacaataatctaaactaaaaacc

SEQ ID NO: 1932 - DNA, 50 bp, Artificial Sequence
  Description of Artificial Sequence: Synthetic probe
atcaaaaaaccaaaataacaatttttacacataaaattcctaattaatca

SEQ ID NO: 1933 - DNA, 50 bp, Artificial Sequence
  Description of Artificial Sequence: Synthetic probe
aaaaaaccaaaataacaatttttacacataaaattcctaattaatcraac

SEQ ID NO: 1934 - DNA, 50 bp, Artificial Sequence
  Description of Artificial Sequence: Synthetic probe
aaaaaccaaaataacaatttttacacataaaattcctaattaatcaaaca

SEQ ID NO: 1935 - DNA, 50 bp, Artificial Sequence
  Description of Artificial Sequence: Synthetic probe
aaaaccaaaataacaatttttacacataaaattcctaattaatcraacrc

SEQ ID NO: 1936 - DNA, 50 bp, Artificial Sequence
  Description of Artificial Sequence: Synthetic probe
aaaccaaaataacaatttttacacataaaattcctaattaatcaaacaca

SEQ ID NO: 1937 - DNA, 50 bp, Artificial Sequence
  Description of Artificial Sequence: Synthetic probe
atcacaaaatcaaaaaatcaaaaccatcctaactaacacaataaaaccca

SEQ ID NO: 1938 - DNA, 50 bp, Artificial Sequence
  Description of Artificial Sequence: Synthetic probe
caacccacaaaaattttaacctaaactaaaaataaacctaaataaaaaca

SEQ ID NO: 1939 - DNA, 50 bp, Artificial Sequence
  Description of Artificial Sequence: Synthetic probe
aaaatctcacaccctccaaaaaataaataactacaacataaaacccaaca

SEQ ID NO: 1940 - DNA, 50 bp, Artificial Sequence
  Description of Artificial Sequence: Synthetic probe
ccaaaaacacaaatcctcattcaaaaaaatataatccttaccatcataca

SEQ ID NO: 1941 - DNA, 50 bp, Artificial Sequence
  Description of Artificial Sequence: Synthetic probe
caatccaaaaacacaaatcctcattcaaaaaaatataatccttaccatca

SEQ ID NO: 1942 - DNA, 50 bp, Artificial Sequence
  Description of Artificial Sequence: Synthetic probe
taaaaacactaaataatctaaaccacaatatccaccacaatccaaaaaca

SEQ ID NO: 1943 - DNA, 50 bp, Artificial Sequence
  Description of Artificial Sequence: Synthetic probe
aattaaccaaacataatacttcatacctataatcccaattactcaaaaca

SEQ ID NO: 1944 - DNA, 50 bp, Artificial Sequence
  Description of Artificial Sequence: Synthetic probe
tacactacaatatcaacttcctaaactcaaaaaaccctcttatctcaaca

SEQ ID NO: 1945 - DNA, 50 bp, Artificial Sequence
  Description of Artificial Sequence: Synthetic probe
tcttatctcaacatcctaaataactaaaactacaaacataaaacaccaca

SEQ ID NO: 1946 - DNA, 50 bp, Artificial Sequence
  Description of Artificial Sequence: Synthetic probe
cataaaaaaacccccatctctacaaaaaaatttaaaaaattaaccaaaca

SEQ ID NO: 1947 - DNA, 50 bp, Artificial Sequence
  Description of Artificial Sequence: Synthetic probe
taatcttcaacatctaaaatcaacaaatctaccttcctctaccttccaca

SEQ ID NO: 1948 - DNA, 50 bp, Artificial Sequence
  Description of Artificial Sequence: Synthetic probe
taattaatttaaaccaaatataataactcacacctataattctaacacca

SEQ ID NO: 1949 - DNA, 50 bp, Artificial Sequence
  Description of Artificial Sequence: Synthetic probe
gtagtatttatattagagttgtttgaataattgggggaaagtgaatgatt

SEQ ID NO: 1950 - DNA, 50 bp, Artificial Sequence
  Description of Artificial Sequence: Synthetic probe
tacctaacaatattctttcctacacaacctcttcattttcaaaacccaca

SEQ ID NO: 1951 - DNA, 50 bp, Artificial Sequence
  Description of Artificial Sequence: Synthetic probe
acaataaataacaaaatcttaataactcctaataatcaaaaatctaatca

SEQ ID NO: 1952 - DNA, 50 bp, Artificial Sequence
  Description of Artificial Sequence: Synthetic probe
acttttaaacacatttatatatcaaaaaaccaaaatcacatttttaacca

SEQ ID NO: 1953 - DNA, 50 bp, Artificial Sequence
  Description of Artificial Sequence: Synthetic probe
ttttttagatagtttttgggttaagatttagggaaatattgagatagagt

SEQ ID NO: 1954 - DNA, 50 bp, Artificial Sequence; identical to SEQ ID NO: 1953
  Description of Artificial Sequence: Synthetic probe

SEQ ID NO: 1955 - DNA, 50 bp, Artificial Sequence
  Description of Artificial Sequence: Synthetic probe
ttctcaaacaactcctaaaccaaaactcaaaaaaacattaaaacaaaaca

SEQ ID NO: 1956 - DNA, 50 bp, Artificial Sequence; identical to SEQ ID NO: 1955
  Description of Artificial Sequence: Synthetic probe

SEQ ID NO: 1957 - DNA, 50 bp, Artificial Sequence; identical to SEQ ID NO: 1955
  Description of Artificial Sequence: Synthetic probe

SEQ ID NO: 1958 - DNA, 50 bp, Artificial Sequence; identical to SEQ ID NO: 1955
  Description of Artificial Sequence: Synthetic probe

SEQ ID NO: 1959 - DNA, 50 bp, Artificial Sequence
  Description of Artificial Sequence: Synthetic probe
aacaaaattcaaaacaccataacaccatcctcaacaactaaaaaaaatca

SEQ ID NO: 1960 - DNA, 50 bp, Artificial Sequence
  Description of Artificial Sequence: Synthetic probe
aaactatactttaaccttaacaatccctatctcctcttcccaatattcca

SEQ ID NO: 1961 - DNA, 50 bp, Artificial Sequence
  Description of Artificial Sequence: Synthetic probe
caccaaaaccaaaacacaattttaccaaataaacctacaaaccctaaaca

SEQ ID NO: 1962 - DNA, 50 bp, Artificial Sequence
  Description of Artificial Sequence: Synthetic probe
ccctaaacaactactacaaccaaaataaaacctataaataacaccaacca

SEQ ID NO: 1963 - DNA, 50 bp, Artificial Sequence
  Description of Artificial Sequence: Synthetic probe
ctaccaccttttctcaaaaatttctaactcacttcccatattcccttaca

SEQ ID NO: 1964 - DNA, 50 bp, Artificial Sequence
  Description of Artificial Sequence: Synthetic probe
ataccaaaataaacttaaaatctacaacatcttataaaaaaacacaccca

SEQ ID NO: 1965 - DNA, 50 bp, Artificial Sequence
  Description of Artificial Sequence: Synthetic probe
catattccattaacaacttccttttctttacttttatattataaattaca

SEQ ID NO: 1966 - DNA, 50 bp, Artificial Sequence
  Description of Artificial Sequence: Synthetic probe
aaaactaaaaacaatcacatatacatcaataaaaattaacaaaataatca

SEQ ID NO: 1967 - DNA, 50 bp, Artificial Sequence
  Description of Artificial Sequence: Synthetic probe
acatacatcaacatcacaaaaaaatacacattatataaattctctataca

SEQ ID NO: 1968 - DNA, 50 bp, Artificial Sequence
  Description of Artificial Sequence: Synthetic probe
atatatatatatccaaatcacaatttaacctactttttttaacttcccca

SEQ ID NO: 1969 - DNA, 50 bp, Artificial Sequence
  Description of Artificial Sequence: Synthetic probe
acctttacaatcataactacatttatttctcttcaaaaatttctaattca

SEQ ID NO: 1970 - DNA, 50 bp, Artificial Sequence
  Description of Artificial Sequence: Synthetic probe
atcccaaaactttaataccatacaataatacctttacaatcataactaca

SEQ ID NO: 1971 - DNA, 50 bp, Artificial Sequence
  Description of Artificial Sequence: Synthetic probe
ctttaatactcctcctttccaaaaatacaacttcattccctccctattca

SEQ ID NO: 1972 - DNA, 50 bp, Artificial Sequence
  Description of Artificial Sequence: Synthetic probe
tcaacattactctatcaattaaaaataaatcattaaatccaaaccacaca

SEQ ID NO: 1973 - DNA, 50 bp, Artificial Sequence
  Description of Artificial Sequence: Synthetic probe
aacctcttccaaaaaccatataaaaaattcttatatcttataaatcccca

SEQ ID NO: 1974 - DNA, 50 bp, Artificial Sequence
  Description of Artificial Sequence: Synthetic probe
aatctaattatcttccaaaactaaatcatctaaaaactcaaataaaacca

SEQ ID NO: 1975 - DNA, 50 bp, Artificial Sequence
  Description of Artificial Sequence: Synthetic probe
attctcaaacttaaatacaatattttataaatttttaatacatttatcca

SEQ ID NO: 1976 - DNA, 50 bp, Artificial Sequence
  Description of Artificial Sequence: Synthetic probe
tatagaatgtattaaagattaaggtgtaagtaatattgtgttaggttttg

SEQ ID NO: 1977 - DNA, 50 bp, Artificial Sequence
  Description of Artificial Sequence: Synthetic probe
atagaatgtattaaagattaaggtgtaagtaatattgtgttaggttttgt

SEQ ID NO: 1978 - DNA, 50 bp, Artificial Sequence; identical to SEQ ID NO: 1977
  Description of Artificial Sequence: Synthetic probe

SEQ ID NO: 1979 - DNA, 50 bp, Artificial Sequence; identical to SEQ ID NO: 1977
  Description of Artificial Sequence: Synthetic probe

SEQ ID NO: 1980 - DNA, 50 bp, Artificial Sequence; identical to SEQ ID NO: 1977
  Description of Artificial Sequence: Synthetic probe

SEQ ID NO: 1981 - DNA, 50 bp, Artificial Sequence
  Description of Artificial Sequence: Synthetic probe
acaaaatacattaaaaaccaaaatacaaataacactataccaaactttac

SEQ ID NO: 1982 - DNA, 50 bp, Artificial Sequence; identical to SEQ ID NO: 1981
  Description of Artificial Sequence: Synthetic probe

SEQ ID NO: 1983 - DNA, 50 bp, Artificial Sequence
  Description of Artificial Sequence: Synthetic probe
caaaatacattaaaaaccaaaatacaaataacactataccaaactttaca

SEQ ID NO: 1984 - DNA, 50 bp, Artificial Sequence; identical to SEQ ID NO: 1983
  Description of Artificial Sequence: Synthetic probe

SEQ ID NO: 1985 - DNA, 50 bp, Artificial Sequence; identical to SEQ ID NO: 1983
  Description of Artificial Sequence: Synthetic probe

SEQ ID NO: 1986 - DNA, 50 bp, Artificial Sequence; identical to SEQ ID NO: 1983
  Description of Artificial Sequence: Synthetic probe

SEQ ID NO: 1987 - DNA, 50 bp, Artificial Sequence
  Description of Artificial Sequence: Synthetic probe
caccatattaactaaaataatctcaatctcctaaccttataatccacaca

SEQ ID NO: 1988 - DNA, 50 bp, Artificial Sequence
  Description of Artificial Sequence: Synthetic probe
ttcaccatattaactaaaataatctcaatctcctaaccttataatccaca

SEQ ID NO: 1989 - DNA, 50 bp, Artificial Sequence
  Description of Artificial Sequence: Synthetic probe
tatatagtttagatgtgaataatttataataataggtaagtgtatgggtt

SEQ ID NO: 1990 - DNA, 50 bp, Artificial Sequence
  Description of Artificial Sequence: Synthetic probe
ctaaattactctaactaatcttaaactcctaaactcaaacaatcctccca

SEQ ID NO: 1991 - DNA, 50 bp, Artificial Sequence
  Description of Artificial Sequence: Synthetic probe
tgttattttggttaaagtgtagtggtatgtttatgatttattgaagtttt

SEQ ID NO: 1992 - DNA, 50 bp, Artificial Sequence
  Description of Artificial Sequence: Synthetic probe
tttacaaacaaaacatcactctattaccctaactaaaatacaataacaca

SEQ ID NO: 1993 - DNA, 50 bp, Artificial Sequence
  Description of Artificial Sequence: Synthetic probe
acattaatcacataaaccaaaaaaatcaaaacttcaataaatcataaaca

SEQ ID NO: 1994 - DNA, 50 bp, Artificial Sequence
  Description of Artificial Sequence: Synthetic probe
aataaatcataaacataccactacactttaaccaaaataacaaaataaca

SEQ ID NO: 1995 - DNA, 50 bp, Artificial Sequence
  Description of Artificial Sequence: Synthetic probe
tttaattacctcaaaattacaaatacttaatacaaccaaaatacccttca

SEQ ID NO: 1996 - DNA, 50 bp, Artificial Sequence
  Description of Artificial Sequence: Synthetic probe
ttatatatacaaatccaaaacatctcaatacaaaacacaatatattacca

SEQ ID NO: 1997 - DNA, 50 bp, Artificial Sequence
  Description of Artificial Sequence: Synthetic probe
tacacaatctaaaaaaataaaacttcactttataaatctaattacaatac

SEQ ID NO: 1998 - DNA, 50 bp, Artificial Sequence
  Description of Artificial Sequence: Synthetic probe
acacaatctaaaaaaataaaacttcactttataaatctaattacaataca

SEQ ID NO: 1999 - DNA, 50 bp, Artificial Sequence
  Description of Artificial Sequence: Synthetic probe
crtaaccattcaaaaactaccaaaattatactacccactataacacaatc

SEQ ID NO: 2000 - DNA, 50 bp, Artificial Sequence
  Description of Artificial Sequence: Synthetic probe
ataaccattcaaaaactaccaaaattatactacccactataacacaatca

SEQ ID NO: 2001 - DNA, 50 bp, Artificial Sequence
  Description of Artificial Sequence: Synthetic probe
caaaaactaccaaaattatactacccactataacacaatcraaaacccac

SEQ ID NO: 2002 - DNA, 50 bp, Artificial Sequence
  Description of Artificial Sequence: Synthetic probe
ttaggggttattaagattgtgttatttattgtagtataatyggagattta

SEQ ID NO: 2003 - DNA, 50 bp, Artificial Sequence
  Description of Artificial Sequence: Synthetic probe
taggggttattaagattgtgttatttattgtagtataattggagatttat

SEQ ID NO: 2004 - DNA, 50 bp, Artificial Sequence
  Description of Artificial Sequence: Synthetic probe
ggggttattaagattgtgttatttattgtagtataatyggagatttaygt

SEQ ID NO: 2005 - DNA, 50 bp, Artificial Sequence
  Description of Artificial Sequence: Synthetic probe
gggttattaagattgtgttatttattgtagtataattggagatttatgtt

SEQ ID NO: 2006 - DNA, 50 bp, Artificial Sequence
  Description of Artificial Sequence: Synthetic probe
aaactaccaaaattatactacccactataacacaatcraaaacccacrcc

SEQ ID NO: 2007 - DNA, 50 bp, Artificial Sequence
  Description of Artificial Sequence: Synthetic probe
aaaattatactacccactataacacaatcraaaacccacrccraaactac

SEQ ID NO: 2008 - DNA, 50 bp, Artificial Sequence
  Description of Artificial Sequence: Synthetic probe
aaattatactacccactataacacaatcaaaaacccacaccaaaactaca

SEQ ID NO: 2009 - DNA, 50 bp, Artificial Sequence
  Description of Artificial Sequence: Synthetic probe
atcraatataaacacctaaaattcttatatcraaaatctccacraatccc

SEQ ID NO: 2010 - DNA, 50 bp, Artificial Sequence
  Description of Artificial Sequence: Synthetic probe
tcaaatataaacacctaaaattcttatatcaaaaatctccacaaatccca

SEQ ID NO: 2011 - DNA, 50 bp, Artificial Sequence
  Description of Artificial Sequence: Synthetic probe
taagattgtgttatttattgtagtataatyggagatttaygtygaggttg

SEQ ID NO: 2012 - DNA, 50 bp, Artificial Sequence
  Description of Artificial Sequence: Synthetic probe
aagattgtgttatttattgtagtataattggagatttatgttgaggttgt

SEQ ID NO: 2013 - DNA, 50 bp, Artificial Sequence
  Description of Artificial Sequence: Synthetic probe
aaataaaatcraatataaacacctaaaattcttatatcraaaatctccac

SEQ ID NO: 2014 - DNA, 50 bp, Artificial Sequence
  Description of Artificial Sequence: Synthetic probe
aataaaatcaaatataaacacctaaaattcttatatcaaaaatctccaca

SEQ ID NO: 2015 - DNA, 50 bp, Artificial Sequence
  Description of Artificial Sequence: Synthetic probe
aacctaaactaaaaataaaatcraatataaacacctaaaattcttatatc

SEQ ID NO: 2016 - DNA, 50 bp, Artificial Sequence
  Description of Artificial Sequence: Synthetic probe
acctaaactaaaaataaaatcaaatataaacacctaaaattcttatatca

SEQ ID NO: 2017 - DNA, 50 bp, Artificial Sequence
  Description of Artificial Sequence: Synthetic probe
taccccaatcaatcccccaaaaatttaaacctaaactaaaaataaaatca

SEQ ID NO: 2018 - DNA, 50 bp, Artificial Sequence
  Description of Artificial Sequence: Synthetic probe
ttgttttgattaattttttggggatttgggtttgaattgaaaatggaatt

SEQ ID NO: 2019 - DNA, 50 bp, Artificial Sequence
  Description of Artificial Sequence: Synthetic probe
tatacccrattccattttcaattcaaacccaaatccccraaaaattaatc

SEQ ID NO: 2020 - DNA, 50 bp, Artificial Sequence
  Description of Artificial Sequence: Synthetic probe
atacccaattccattttcaattcaaacccaaatccccaaaaaattaatca

SEQ ID NO: 2021 - DNA, 50 bp, Artificial Sequence
  Description of Artificial Sequence: Synthetic probe
aatcacaactatatatccactaaaaataaaaaaccctatccccaaaccca

SEQ ID NO: 2022 - DNA, 50 bp, Artificial Sequence
  Description of Artificial Sequence: Synthetic probe
taaacaactctacatattcctcctccaaaacatctaaaccaccttttcca

SEQ ID NO: 2023 - DNA, 50 bp, Artificial Sequence
  Description of Artificial Sequence: Synthetic probe
ttagatgttttggaggaggaatatgtagagttgtttaaaatttatttgtt

SEQ ID NO: 2024 - DNA, 50 bp, Artificial Sequence
  Description of Artificial Sequence: Synthetic probe
acattacaacctctccttctcattcttaaaacctttactaaaccactcca

SEQ ID NO: 2025 - DNA, 50 bp, Artificial Sequence
  Description of Artificial Sequence: Synthetic probe
aaaaaaaacatacaaaactactcaaaacctacctaccaaaaaaataaaca

SEQ ID NO: 2026 - DNA, 50 bp, Artificial Sequence
  Description of Artificial Sequence: Synthetic probe
tataccaaaaaataactaaaaacccaccctacactctaaaacaattaaca

SEQ ID NO: 2027 - DNA, 50 bp, Artificial Sequence
  Description of Artificial Sequence: Synthetic probe
caatattccaaaaattatcttcccctcctttcccacaaaaacttcatcca

SEQ ID NO: 2028 - DNA, 50 bp, Artificial Sequence
  Description of Artificial Sequence: Synthetic probe
ctaaaaacccaccctacactctaaaacaattaacaaataaaatctctaca

SEQ ID NO: 2029 - DNA, 50 bp, Artificial Sequence
  Description of Artificial Sequence: Synthetic probe
aaaaataccacatatcaatattccaaaaattatcttcccctcctttccca

SEQ ID NO: 2030 - DNA, 50 bp, Artificial Sequence
  Description of Artificial Sequence: Synthetic probe
aaaaaaaattcctaatacccaaaactactaaaaaatcaaaaaataccaca

SEQ ID NO: 2031 - DNA, 50 bp, Artificial Sequence
  Description of Artificial Sequence: Synthetic probe
atatctaaaacaaaaacaaaaatttctaatcctaacctaaataaaaacca

SEQ ID NO: 2032 - DNA, 50 bp, Artificial Sequence
  Description of Artificial Sequence: Synthetic probe
ctaaatccctcaacctccactcaaatcaaaaccaaaaatctctatttcca

SEQ ID NO: 2033 - DNA, 50 bp, Artificial Sequence
  Description of Artificial Sequence: Synthetic probe
aacacctaaaataatctcttattccttaaaaaattctaatatctaaaaca

SEQ ID NO: 2034 - DNA, 50 bp, Artificial Sequence
  Description of Artificial Sequence: Synthetic probe
aatcaatataatctccaaaaaataaaaacccaaaacccaacacctcaaca

SEQ ID NO: 2035 - DNA, 50 bp, Artificial Sequence
  Description of Artificial Sequence: Synthetic probe
tactaaaccctaaacttctaccctctaaaaatcacactaacccaaaaaca

SEQ ID NO: 2036 - DNA, 50 bp, Artificial Sequence
  Description of Artificial Sequence: Synthetic probe
aatctaatctccacaaactctacatcctaaatttaatcctccccatccca

SEQ ID NO: 2037 - DNA, 50 bp, Artificial Sequence
  Description of Artificial Sequence: Synthetic probe
cattcatctccttaccccatcttaatataaaaaactcaaacaacccctca

SEQ ID NO: 2038 - DNA, 50 bp, Artificial Sequence
  Description of Artificial Sequence: Synthetic probe
aacctttaaacaaaatcaaaactaaaacctaaaaatcaaaacccctcaca

SEQ ID NO: 2039 - DNA, 50 bp, Artificial Sequence
  Description of Artificial Sequence: Synthetic probe
caataattacaacaactaaaaaaaccaaaccaacaataatacccacaaca

SEQ ID NO: 2040 - DNA, 50 bp, Artificial Sequence
  Description of Artificial Sequence: Synthetic probe
cattactaacctaattcttctaattactataatcactataactataatca

SEQ ID NO: 2041 - DNA, 50 bp, Artificial Sequence
  Description of Artificial Sequence: Synthetic probe
acaccatctccacacacatttaccctattcaaaaaccctatctatcaaca

SEQ ID NO: 2042 - DNA, 50 bp, Artificial Sequence
  Description of Artificial Sequence: Synthetic probe
ataataaatttatccttcattttcacaaatactttacaaaaaaataaaca

SEQ ID NO: 2043 - DNA, 50 bp, Artificial Sequence
  Description of Artificial Sequence: Synthetic probe
aaatcccaaaacctcaaacataactctcaaaatctcaaaccccaaaaaca

SEQ ID NO: 2044 - DNA, 50 bp, Artificial Sequence
  Description of Artificial Sequence: Synthetic probe
aataacataatataatactttatcttaaaaaaatatcctaaactcacaca

SEQ ID NO: 2045 - DNA, 50 bp, Artificial Sequence
  Description of Artificial Sequence: Synthetic probe
tagtaatatagtgtggtattttgttttgaggagatgttttggatttatat

SEQ ID NO: 2046 - DNA, 50 bp, Artificial Sequence
  Description of Artificial Sequence: Synthetic probe
ataactttaacctattaatatataaatacatctaaaaacattacaacaca

SEQ ID NO: 2047 - DNA, 50 bp, Artificial Sequence
  Description of Artificial Sequence: Synthetic probe
agttatagatatattgtttgggaaagtgaaatttaagagttttgtgagtt

SEQ ID NO: 2048 - DNA, 50 bp, Artificial Sequence
  Description of Artificial Sequence: Synthetic probe
taataaataacataaccttaataacccctaaataatcaaaaatctaatca

SEQ ID NO: 2049 - DNA, 50 bp, Artificial Sequence
  Description of Artificial Sequence: Synthetic probe
tttttagaagaaaaattattttagggagtttgttgttagagagtgagttt

SEQ ID NO: 2050 - DNA, 50 bp, Artificial Sequence
  Description of Artificial Sequence: Synthetic probe
tttttgagttttggtttaggagttgtttgagaaattagggagaaattttt

SEQ ID NO: 2051 - DNA, 50 bp, Artificial Sequence; identical to SEQ ID NO: 2050
  Description of Artificial Sequence: Synthetic probe

SEQ ID NO: 2052 - DNA, 50 bp, Artificial Sequence; identical to SEQ ID NO: 2050
  Description of Artificial Sequence: Synthetic probe

SEQ ID NO: 2053 - DNA, 50 bp, Artificial Sequence; identical to SEQ ID NO: 2050
  Description of Artificial Sequence: Synthetic probe

SEQ ID NO: 2054 - DNA, 50 bp, Artificial Sequence
  Description of Artificial Sequence: Synthetic probe
ttctcaaacaactcctaaaccaaaactcaaaaaaacactaaaacaaaaca

SEQ ID NO: 2055 - DNA, 50 bp, Artificial Sequence; identical to SEQ ID NO: 2054
  Description of Artificial Sequence: Synthetic probe

SEQ ID NO: 2056 - DNA, 50 bp, Artificial Sequence; identical to SEQ ID NO: 2054
  Description of Artificial Sequence: Synthetic probe

SEQ ID NO: 2057 - DNA, 50 bp, Artificial Sequence; identical to SEQ ID NO: 2054
  Description of Artificial Sequence: Synthetic probe

SEQ ID NO: 2058 - DNA, 50 bp, Artificial Sequence
  Description of Artificial Sequence: Synthetic probe
ttttttagatagtttttgggttaagatttagggagatattgagatagaat

SEQ ID NO: 2059 - DNA, 50 bp, Artificial Sequence
  Description of Artificial Sequence: Synthetic probe
acttaacacaaaaataacaaaatcaaaacaaaatcccaaaacctcaaaca

SEQ ID NO: 2060 - DNA, 50 bp, Artificial Sequence; identical to SEQ ID NO: 2059
  Description of Artificial Sequence: Synthetic probe

SEQ ID NO: 2061 - DNA, 50 bp, Artificial Sequence; identical to SEQ ID NO: 2059
  Description of Artificial Sequence: Synthetic probe

SEQ ID NO: 2062 - DNA, 50 bp, Artificial Sequence; identical to SEQ ID NO: 2059
  Description of Artificial Sequence: Synthetic probe

SEQ ID NO: 2063 - DNA, 50 bp, Artificial Sequence
  Description of Artificial Sequence: Synthetic probe
aaaaaaaccccacattaaaaattctctcctccttctcctaacctatatca

SEQ ID NO: 2064 - DNA, 50 bp, Artificial Sequence
  Description of Artificial Sequence: Synthetic probe
ggtttttttaaaaatttgttatttaatgggagtgagaattggggttgttt

SEQ ID NO: 2065 - DNA, 50 bp, Artificial Sequence
  Description of Artificial Sequence: Synthetic probe
ataaatccaaataaataaacaaaaactttaaaaccaaaaccacaacaaca

SEQ ID NO: 2066 - DNA, 50 bp, Artificial Sequence
  Description of Artificial Sequence: Synthetic probe
ccaattctcactcccattaaataacaaatttttaaaaaaaccaatcaaca

SEQ ID NO: 2067 - DNA, 50 bp, Artificial Sequence
  Description of Artificial Sequence: Synthetic probe
aaaaaaataaatccaaataaataaacaaaaactttaaaaccaaaaccaca

SEQ ID NO: 2068 - DNA, 50 bp, Artificial Sequence
  Description of Artificial Sequence: Synthetic probe
actactctcaaaaaccctaaccctaaccaaaacctaaacaaataaataca

SEQ ID NO: 2069 - DNA, 50 bp, Artificial Sequence; identical to SEQ ID NO: 2068
  Description of Artificial Sequence: Synthetic probe

SEQ ID NO: 2070 - DNA, 50 bp, Artificial Sequence; identical to SEQ ID NO: 2068
  Description of Artificial Sequence: Synthetic probe

SEQ ID NO: 2071 - DNA, 50 bp, Artificial Sequence; identical to SEQ ID NO: 2068
  Description of Artificial Sequence: Synthetic probe

SEQ ID NO: 2072 - DNA, 50 bp, Artificial Sequence
  Description of Artificial Sequence: Synthetic probe
caccaaaaccaacctacaaaaattttaactaaaaataaaaccaaataaca

SEQ ID NO: 2073 - DNA, 50 bp, Artificial Sequence
  Description of Artificial Sequence: Synthetic probe
caaaacaacaaaacctaaaaacccttaacccaaaaaaaacccaaaaacca

SEQ ID NO: 2074 - DNA, 50 bp, Artificial Sequence
  Description of Artificial Sequence: Synthetic probe
cacaaattaatcctaacaaaaacaaaactcaataaacaaaactaaccaca

SEQ ID NO: 2075 - DNA, 50 bp, Artificial Sequence
  Description of Artificial Sequence: Synthetic probe
ctccacaaccttactcaactctccttaaattacctatactctaaaataca

SEQ ID NO: 2076 - DNA, 50 bp, Artificial Sequence
  Description of Artificial Sequence: Synthetic probe
aaacaaactttctctccttctatccaacacttaaaatcacacttacatca

SEQ ID NO: 2077 - DNA, 50 bp, Artificial Sequence
  Description of Artificial Sequence: Synthetic probe
taactcacttcccatattcccttacaaatatatccccttataaaatatca

SEQ ID NO: 2078 - DNA, 50 bp, Artificial Sequence
  Description of Artificial Sequence: Synthetic probe
ttagtttaagttttttaaggagtagatgttaagatgagtttaaagtttgt

SEQ ID NO: 2079 - DNA, 50 bp, Artificial Sequence
  Description of Artificial Sequence: Synthetic probe
taatccaaatccttcaaaaaacaaataccaaaataaacttaaaatctaca

SEQ ID NO: 2080 - DNA, 50 bp, Artificial Sequence
  Description of Artificial Sequence: Synthetic probe
aataaaaaatctaaacaaatcccacaacctcaaaataaatcccaaaccca

SEQ ID NO: 2081 - DNA, 50 bp, Artificial Sequence
  Description of Artificial Sequence: Synthetic probe
aaattttaataaaaacaccttaaaattctcccaaataaaaaatctaaaca

SEQ ID NO: 2082 - DNA, 50 bp, Artificial Sequence
  Description of Artificial Sequence: Synthetic probe
aaattctcacaccctccaataaataattaactacaacctaaaatccaaca

SEQ ID NO: 2083 - DNA, 50 bp, Artificial Sequence
  Description of Artificial Sequence: Synthetic probe
aatccttaccatcataaacatactattcatacccacaaaaaaaacatcca

SEQ ID NO: 2084 - DNA, 50 bp, Artificial Sequence
  Description of Artificial Sequence: Synthetic probe
cacattaaccacctcacacttacacttaaaaatctaaaccacaatatcca

SEQ ID NO: 2085 - DNA, 50 bp, Artificial Sequence
  Description of Artificial Sequence: Synthetic probe
ttattcaaccacattaaccacctcacacttacacttaaaaatctaaacca

SEQ ID NO: 2086 - DNA, 50 bp, Artificial Sequence
  Description of Artificial Sequence: Synthetic probe
aaacacctaaaataatctcctattccttaaaaaattctaatctctaaaca

SEQ ID NO: 2087 - DNA, 50 bp, Artificial Sequence
  Description of Artificial Sequence: Synthetic probe
tgtttagagattagaattttttaaggaataggagattattttaggtgttt

SEQ ID NO: 2088 - DNA, 50 bp, Artificial Sequence
  Description of Artificial Sequence: Synthetic probe
tactaaaccctaaacttctaccctacaaaaatcatactaacctaacaaca

SEQ ID NO: 2089 - DNA, 50 bp, Artificial Sequence
  Description of Artificial Sequence: Synthetic probe
tatgtttgttagggaaagtaggagtttttttgaagatttttaatagggtt

SEQ ID NO: 2090 - DNA, 50 bp, Artificial Sequence
  Description of Artificial Sequence: Synthetic probe
gtgattgtagttttagtgattatagttgtaaggataattaggttagtaat

SEQ ID NO: 2091 - DNA, 50 bp, Artificial Sequence
  Description of Artificial Sequence: Synthetic probe
atatcattactaacctaattatccttacaactataatcactaaaactaca

SEQ ID NO: 2092 - DNA, 50 bp, Artificial Sequence
  Description of Artificial Sequence: Synthetic probe
tcaaaaaaaaatccctaactaaaaacaaaccttaaaaaaacaattaatca

SEQ ID NO: 2093 - DNA, 50 bp, Artificial Sequence
  Description of Artificial Sequence: Synthetic probe
attctactctaaacaataacaatacccaaaactctaatatatctctcaca

SEQ ID NO: 2094 - DNA, 50 bp, Artificial Sequence
  Description of Artificial Sequence: Synthetic probe
cttctaaaatatcaaacacataaacatataaaaaaatatctaatttatca

SEQ ID NO: 2095 - DNA, 50 bp, Artificial Sequence
  Description of Artificial Sequence: Synthetic probe
acactcatatttcattcattcaatcaacaaaaattaatttaatccctaca

SEQ ID NO: 2096 - DNA, 50 bp, Artificial Sequence
  Description of Artificial Sequence: Synthetic probe
aaattaatttaatccctacaataaaccaaatatcccctcatatactcaca

SEQ ID NO: 2097 - DNA, 50 bp, Artificial Sequence
  Description of Artificial Sequence: Synthetic probe
ttaaaatccataaaacaatatatttaaacctaaaaattctactactttca

SEQ ID NO: 2098 - DNA, 50 bp, Artificial Sequence
  Description of Artificial Sequence: Synthetic probe
atcaatacaaactttattcacctcaaaattacaactattcaatataatca

SEQ ID NO: 2099 - DNA, 50 bp, Artificial Sequence
  Description of Artificial Sequence: Synthetic probe
aatacttcctaaaaacaaacaatacataaacactaataaaaaacattaca

SEQ ID NO: 2100 - DNA, 50 bp, Artificial Sequence
  Description of Artificial Sequence: Synthetic probe
ctaaaaaaatccaaataaacaaaaaatccaattcaaaaacaaaaattcca

SEQ ID NO: 2101 - DNA, 50 bp, Artificial Sequence
  Description of Artificial Sequence: Synthetic probe
tttttgagttttggtttaggagttgtttgagaaattaggaagaaattttt

SEQ ID NO: 2102 - DNA, 50 bp, Artificial Sequence
  Description of Artificial Sequence: Synthetic probe
accaaaactcaaaaaaacactaaaacaaaacacttaacacaaaaaaaaca

SEQ ID NO: 2103 - DNA, 50 bp, Artificial Sequence
  Description of Artificial Sequence: Synthetic probe
aaaacaaaatcccaaaaccccaaacataactctcaaaatctcaaacccca

SEQ ID NO: 2104 - DNA, 50 bp, Artificial Sequence
  Description of Artificial Sequence: Synthetic probe
aacacaattctcattcccactaaatatcaaatttctaaaaaaaccaatca

SEQ ID NO: 2105 - DNA, 50 bp, Artificial Sequence
  Description of Artificial Sequence: Synthetic probe
aacctaaacacataaatacaaaatctacaaaaaaataatcaaaaaaaaca

SEQ ID NO: 2106 - DNA, 50 bp, Artificial Sequence
  Description of Artificial Sequence: Synthetic probe
ccaaaacataataatataaaaatacctcataaaataaaaacctaaaaaca

SEQ ID NO: 2107 - DNA, 50 bp, Artificial Sequence
  Description of Artificial Sequence: Synthetic probe
tattaaaaccaaaacacacaaatctacaaaacccaaacacaaactaaaca

SEQ ID NO: 2108 - DNA, 50 bp, Artificial Sequence
  Description of Artificial Sequence: Synthetic probe
aaatctacaaaacccaaacacaaactaaacaaaaaaacctacaaatcaca

SEQ ID NO: 2109 - DNA, 50 bp, Artificial Sequence
  Description of Artificial Sequence: Synthetic probe
ctaccccaaccaacccacaaaaattttaacctaaactaaaaataaaacca

SEQ ID NO: 2110 - DNA, 50 bp, Artificial Sequence
  Description of Artificial Sequence: Synthetic probe
ttgtagttatatattatttgtatggtgtgagaatttggttttgtttttgt

SEQ ID NO: 2111 - DNA, 50 bp, Artificial Sequence
  Description of Artificial Sequence: Synthetic probe
aaattctcacaccatacaaataatatataactacaacataaaacccaaca

SEQ ID NO: 2112 - DNA, 50 bp, Artificial Sequence
  Description of Artificial Sequence: Synthetic probe
atacaaataatatataactacaacataaaacccaacaaacacttcctcca

SEQ ID NO: 2113 - DNA, 50 bp, Artificial Sequence
  Description of Artificial Sequence: Synthetic probe
ttcaaaacaatataatccttaccatcataaacatactattcatacccaca

SEQ ID NO: 2114 - DNA, 50 bp, Artificial Sequence
  Description of Artificial Sequence: Synthetic probe
aaaccacaacaaacataacaactcaaatcaccaaacacaaataaaaaaca

SEQ ID NO: 2115 - DNA, 50 bp, Artificial Sequence
  Description of Artificial Sequence: Synthetic probe
ccatttatctccctttcttataaaaaaccaaccccaaaaatctacaaaca

SEQ ID NO: 2116 - DNA, 50 bp, Artificial Sequence
  Description of Artificial Sequence: Synthetic probe
ccataacttttcctctcaaaccttattctctacttcacactcaatataca

SEQ ID NO: 2117 - DNA, 50 bp, Artificial Sequence
  Description of Artificial Sequence: Synthetic probe
ccaactcttctaaatccctcaacctccactcaaatcaaaaccaaaaatca

SEQ ID NO: 2118 - DNA, 50 bp, Artificial Sequence
  Description of Artificial Sequence: Synthetic probe
tcaaaaaattcaaacattttacatctatcataaaacactcctccaacaca

SEQ ID NO: 2119 - DNA, 50 bp, Artificial Sequence
  Description of Artificial Sequence: Synthetic probe
aaaatatcccataacaaatacaaaatacctaaattttctaactcttccca

SEQ ID NO: 2120 - DNA, 50 bp, Artificial Sequence; identical to SEQ ID NO: 2119
  Description of Artificial Sequence: Synthetic probe

SEQ ID NO: 2121 - DNA, 50 bp, Artificial Sequence; identical to SEQ ID NO: 2119
  Description of Artificial Sequence: Synthetic probe

SEQ ID NO: 2122 - DNA, 50 bp, Artificial Sequence; identical to SEQ ID NO: 2119
  Description of Artificial Sequence: Synthetic probe

SEQ ID NO: 2123 - DNA, 50 bp, Artificial Sequence
  Description of Artificial Sequence: Synthetic probe
cacataacaaatatatctctactcctctccaaaaaacaccaccacaacca

SEQ ID NO: 2124 - DNA, 50 bp, Artificial Sequence
  Description of Artificial Sequence: Synthetic probe
aactcataaaaaccaaacctacaaaaaataaaaccttccaaaaataaaca

SEQ ID NO: 2125 - DNA, 50 bp, Artificial Sequence
  Description of Artificial Sequence: Synthetic probe
attatagttataagtagaattaggttagtaatgatgtttatgatggggat

SEQ ID NO: 2126 - DNA, 50 bp, Artificial Sequence
  Description of Artificial Sequence: Synthetic probe
tccctcattataacaaatactttacaaaaaaataaatactaacacacaca

SEQ ID NO: 2127 - DNA, 50 bp, Artificial Sequence
  Description of Artificial Sequence: Synthetic probe
tggttattgggaagtattatttatatttatgggtttatttagtttgggtt

SEQ ID NO: 2128 - DNA, 50 bp, Artificial Sequence
  Description of Artificial Sequence: Synthetic probe
aattactaaaaaacaccatccacactcataaacctacccaacctaaacca

SEQ ID NO: 2129 - DNA, 50 bp, Artificial Sequence
  Description of Artificial Sequence: Synthetic probe
caatcacaaatcacaaaaaaaaatccccaaaaacaaacctcaaaaaaaca

SEQ ID NO: 2130 - DNA, 50 bp, Artificial Sequence
  Description of Artificial Sequence: Synthetic probe
cccaccctaaatctacaattacacatttctaaaaacttctctaaaatcca

SEQ ID NO: 2131 - DNA, 50 bp, Artificial Sequence
  Description of Artificial Sequence: Synthetic probe
tgttagaaagaagttagggttataaggttttagaggaatttttaagtttt

SEQ ID NO: 2132 - DNA, 50 bp, Artificial Sequence
  Description of Artificial Sequence: Synthetic probe
taaccacatctactataaaatctaaccaaatcctatttttattctactca

SEQ ID NO: 2133 - DNA, 50 bp, Artificial Sequence
  Description of Artificial Sequence: Synthetic probe
tttttaagttgtgagagatatattagagttttgggtattgttgttgtttt

SEQ ID NO: 2134 - DNA, 50 bp, Artificial Sequence
  Description of Artificial Sequence: Synthetic probe
tttcaaaccataaaaaacacatcaaaaccctaaacactattactacctca

SEQ ID NO: 2135 - DNA, 50 bp, Artificial Sequence
  Description of Artificial Sequence: Synthetic probe
gttttttgagatatgtgttgtgtttattaagggttaaatggattaagggt

SEQ ID NO: 2136 - DNA, 50 bp, Artificial Sequence
  Description of Artificial Sequence: Synthetic probe
cttaatccatttaacccttaataaacacaacacatatctcaaaaaacaca

SEQ ID NO: 2137 - DNA, 50 bp, Artificial Sequence
  Description of Artificial Sequence: Synthetic probe
atttctctatcttttccccacatttcccccctttctattcaacaaaacca

SEQ ID NO: 2138 - DNA, 50 bp, Artificial Sequence
  Description of Artificial Sequence: Synthetic probe
aaataaccaaacaaaaataccccccacctcctaaacaaaataactaacca

SEQ ID NO: 2139 - DNA, 50 bp, Artificial Sequence
  Description of Artificial Sequence: Synthetic probe
ttcccaaactaaacaactactaaataaaaaaactcctcacctctcaaaca

SEQ ID NO: 2140 - DNA, 50 bp, Artificial Sequence
  Description of Artificial Sequence: Synthetic probe
aaactaaacaactactaaataaaaaaactcctcacctctcaaacaaaaca

SEQ ID NO: 2141 - DNA, 50 bp, Artificial Sequence
  Description of Artificial Sequence: Synthetic probe
ctaaataaaaaaactcctcacctctcaaacaaaacaaccaaaaaaaaaca

SEQ ID NO: 2142 - DNA, 50 bp, Artificial Sequence
  Description of Artificial Sequence: Synthetic probe
aatataaaaaacacctctaccctaccaccttatctaaaatataaaaaaca

SEQ ID NO: 2143 - DNA, 50 bp, Artificial Sequence
  Description of Artificial Sequence: Synthetic probe
ataatttaaaatctaccaaatacctaaaattaaaaacacacaccaccaca

SEQ ID NO: 2144 - DNA, 50 bp, Artificial Sequence
  Description of Artificial Sequence: Synthetic probe
acacaacaaaatcccatctccaccaaaaaaatataaaaaccaatcaaaca

SEQ ID NO: 2145 - DNA, 50 bp, Artificial Sequence
  Description of Artificial Sequence: Synthetic probe
aaatcccatctccaccaaaaaaatataaaaaccaatcaaacataataaca

SEQ ID NO: 2146 - DNA, 50 bp, Artificial Sequence
  Description of Artificial Sequence: Synthetic probe
aacattaaataatttaaaatctaccaaatacctaaaattaaaaacacaca

SEQ ID NO: 2147 - DNA, 50 bp, Artificial Sequence
  Description of Artificial Sequence: Synthetic probe
aaaacattaaataatttaaaatctaccaaatacctaaaattaaaaacaca

SEQ ID NO: 2148 - DNA, 50 bp, Artificial Sequence
  Description of Artificial Sequence: Synthetic probe
atcccatctccaccaaaaaaatataaaaaccaatcaaacataataacaca

SEQ ID NO: 2149 - DNA, 50 bp, Artificial Sequence
  Description of Artificial Sequence: Synthetic probe
ataaaaaccaatcaaacataataacacataccttcaatcccaaacactca

SEQ ID NO: 2150 - DNA, 50 bp, Artificial Sequence
  Description of Artificial Sequence: Synthetic probe
tattttttggaaagttagtgtttgaggtattgaataatttagagtttgtt

SEQ ID NO: 2151 - DNA, 50 bp, Artificial Sequence
  Description of Artificial Sequence: Synthetic probe
ctccccatcccacaattaaatcactataatttccacataataaaaaccca

SEQ ID NO: 2152 - DNA, 50 bp, Artificial Sequence
  Description of Artificial Sequence: Synthetic probe
aaaccttcaacaaaatcaaaactaaaacctaaaaatcaaaacccctcaca

SEQ ID NO: 2153 - DNA, 50 bp, Artificial Sequence
  Description of Artificial Sequence: Synthetic probe
caacaataaccacaacacctaaaacaaccaaaacaataacaatacccaca

SEQ ID NO: 2154 - DNA, 50 bp, Artificial Sequence
  Description of Artificial Sequence: Synthetic probe
caaatatcaaaaaaacatttaattcaacttcaacacatcctcttccctca

SEQ ID NO: 2155 - DNA, 50 bp, Artificial Sequence
  Description of Artificial Sequence: Synthetic probe
aaaatttccaaaactataactacaaacccaaatcaaaatcaaaaaaccca

SEQ ID NO: 2156 - DNA, 50 bp, Artificial Sequence
  Description of Artificial Sequence: Synthetic probe
caattctaaaaactcctctaaaatttcataaccctacctcttccctaaca

SEQ ID NO: 2157 - DNA, 50 bp, Artificial Sequence
  Description of Artificial Sequence: Synthetic probe
cattaaataacaaaaccttaataacccctaaataatcaaaaatctaatca

SEQ ID NO: 2158 - DNA, 50 bp, Artificial Sequence
  Description of Artificial Sequence: Synthetic probe
acttttaaacacatttatacatcataaaaccaaaatcacattttttacca

SEQ ID NO: 2159 - DNA, 50 bp, Artificial Sequence
  Description of Artificial Sequence: Synthetic probe
ataaaataaataaaatctatactaactcccaattacaacatataataaca

SEQ ID NO: 2160 - DNA, 50 bp, Artificial Sequence
  Description of Artificial Sequence: Synthetic probe
attactaaataaatccaaaacatctcctcaatataaaataacacactaca

SEQ ID NO: 2161 - DNA, 50 bp, Artificial Sequence
  Description of Artificial Sequence: Synthetic probe
cacaaaactactaaatttaactttcacaaacaatatatctataactccca

SEQ ID NO: 2162 - DNA, 50 bp, Artificial Sequence
  Description of Artificial Sequence: Synthetic probe
atctaaaaacattacaacaaaactcacaaaactactaaatttaactttca

SEQ ID NO: 2163 - DNA, 50 bp, Artificial Sequence
  Description of Artificial Sequence: Synthetic probe
aatgaaggtaaatgtaaaaaataagtgggagttatagatatattgtttgt

SEQ ID NO: 2164 - DNA, 50 bp, Artificial Sequence
  Description of Artificial Sequence: Synthetic probe
caataaataacaaaatcttaacaacccctaaataatcaaatatctaatca

SEQ ID NO: 2165 - DNA, 50 bp, Artificial Sequence
  Description of Artificial Sequence: Synthetic probe
ctttcaaacacatttatatatcaaaaaaccaaaattacatttttttacca

SEQ ID NO: 2166 - DNA, 50 bp, Artificial Sequence
  Description of Artificial Sequence: Synthetic probe
tttttagaaaaaaatttattttagggagtttggtgatagagagggagttt

SEQ ID NO: 2167 - DNA, 50 bp, Artificial Sequence
  Description of Artificial Sequence: Synthetic probe
tttttgagttttggtttaagagttgtttgagaaattagggagaaattttt

SEQ ID NO: 2168 - DNA, 50 bp, Artificial Sequence
  Description of Artificial Sequence: Synthetic probe
aaaacaaaatcctataaccccaaacataactctcaaaatttcaaacccca

SEQ ID NO: 2169 - DNA, 50 bp, Artificial Sequence
  Description of Artificial Sequence: Synthetic probe
taaatcccaataaattcacaaaaacttctaaaacaaaaaccccaacaaca

SEQ ID NO: 2170 - DNA, 50 bp, Artificial Sequence
  Description of Artificial Sequence: Synthetic probe
tcaattctcacccccatttaatatcaaatttctaacaaaaccaatcaaca

SEQ ID NO: 2171 - DNA, 50 bp, Artificial Sequence
  Description of Artificial Sequence: Synthetic probe
atctaaatcccaataaattcacaaaaacttctaaaacaaaaaccccaaca

SEQ ID NO: 2172 - DNA, 50 bp, Artificial Sequence
  Description of Artificial Sequence: Synthetic probe
ccaaaacacaacaatactaaaataccttataaaataaatacctaaaaaca

SEQ ID NO: 2173 - DNA, 50 bp, Artificial Sequence
  Description of Artificial Sequence: Synthetic probe
aacataaacaaattcactcttatcaatctatacacaaacctaatattcca

SEQ ID NO: 2174 - DNA, 50 bp, Artificial Sequence
  Description of Artificial Sequence: Synthetic probe
tggaatattaggtttgtgtatagattgataagagtgaatttgtttatgtt

SEQ ID NO: 2175 - DNA, 50 bp, Artificial Sequence
  Description of Artificial Sequence: Synthetic probe
ttcaccccaaaccaaaatcattcaccaacctaactctaataataataaca

SEQ ID NO: 2176 - DNA, 50 bp, Artificial Sequence
  Description of Artificial Sequence: Synthetic probe
taagagtgaatttgtttatgttgtgttgttattattattagagttaggtt

SEQ ID NO: 2177 - DNA, 50 bp, Artificial Sequence
  Description of Artificial Sequence: Synthetic probe
caaaataaatcttaaaaccaaaaactcacaaaaaaaacccaaaacatcca

SEQ ID NO: 2178 - DNA, 50 bp, Artificial Sequence
  Description of Artificial Sequence: Synthetic probe
acctcaaaataaatcttaaaaccaaaaactcacaaaaaaaacccaaaaca

SEQ ID NO: 2179 - DNA, 50 bp, Artificial Sequence
  Description of Artificial Sequence: Synthetic probe
aatctaacaaatcccacaacctcaaaataaatcttaaaaccaaaaactca

SEQ ID NO: 2180 - DNA, 50 bp, Artificial Sequence
  Description of Artificial Sequence: Synthetic probe
caacccacaaaaattttaacctaaacaaaaaataaaacctaataaaaaca

SEQ ID NO: 2181 - DNA, 50 bp, Artificial Sequence
  Description of Artificial Sequence: Synthetic probe
acccaaacacctttaccaaatttcattttccatttaaaccaaaatcccca

SEQ ID NO: 2182 - DNA, 50 bp, Artificial Sequence
  Description of Artificial Sequence: Synthetic probe
tcattttccatttaaaccaaaatccccacaaattaatcaaaacaaaaaca

SEQ ID NO: 2183 - DNA, 50 bp, Artificial Sequence
  Description of Artificial Sequence: Synthetic probe
aaccaaaatccccacaaattaatcaaaacaaaaacaaaactcaataaaca

SEQ ID NO: 2184 - DNA, 50 bp, Artificial Sequence
  Description of Artificial Sequence: Synthetic probe
cccacaaattaatcaaaacaaaaacaaaactcaataaacaaaactaacca

SEQ ID NO: 2185 - DNA, 50 bp, Artificial Sequence
  Description of Artificial Sequence: Synthetic probe
ctccaaataatatataactacaacttaaaactaaaaaaacacctcctcca

SEQ ID NO: 2186 - DNA, 50 bp, Artificial Sequence
  Description of Artificial Sequence: Synthetic probe
caataacaaaaattacataacccaaaactaaaacctacactcctaaacca

SEQ ID NO: 2187 - DNA, 50 bp, Artificial Sequence
  Description of Artificial Sequence: Synthetic probe
ataacaaaaattacataacccaaaactaaaacctacactcctaaaccaca

SEQ ID NO: 2188 - DNA, 50 bp, Artificial Sequence
  Description of Artificial Sequence: Synthetic probe
ctactctacaaattcttctacctcccacttacacttaataatctaaacca

SEQ ID NO: 2189 - DNA, 50 bp, Artificial Sequence
  Description of Artificial Sequence: Synthetic probe
tctctttataaaaaaccaacccaaaaaatctacaaacaatcaaaaaaaca

SEQ ID NO: 2190 - DNA, 50 bp, Artificial Sequence
  Description of Artificial Sequence: Synthetic probe
gttggttttttataaagagagaaggaaaatgggattaatattagaatgtt

SEQ ID NO: 2191 - DNA, 50 bp, Artificial Sequence
  Description of Artificial Sequence: Synthetic probe
aaatactaataaaaaattccctttaacaccaacaacaaccttaaacccca

SEQ ID NO: 2192 - DNA, 50 bp, Artificial Sequence
  Description of Artificial Sequence: Synthetic probe
tatatatattgagtgtaaagtagagaataaggtttgaggggaaaagtaat

SEQ ID NO: 2193 - DNA, 50 bp, Artificial Sequence
  Description of Artificial Sequence: Synthetic probe
atcaaaaccaaaaatcactattccctcctcaaaaactaaaattttccaca

SEQ ID NO: 2194 - DNA, 50 bp, Artificial Sequence
  Description of Artificial Sequence: Synthetic probe
acccaaacaccaacctaaacacaaatatctaaaataatctccaaattcca

SEQ ID NO: 2195 - DNA, 50 bp, Artificial Sequence
  Description of Artificial Sequence: Synthetic probe
ccaaaaatcactattccctcctcaaaaactaaaattttccacaaaattca

SEQ ID NO: 2196 - DNA, 50 bp, Artificial Sequence
  Description of Artificial Sequence: Synthetic probe
acacaaaacccaaacaccaacctaaacacaaatatctaaaataatctcca

SEQ ID NO: 2197 - DNA, 50 bp, Artificial Sequence
  Description of Artificial Sequence: Synthetic probe
tcaaaaaattcaaacactttacatctctcataaaacactccaacaacaca

SEQ ID NO: 2198 - DNA, 50 bp, Artificial Sequence
  Description of Artificial Sequence: Synthetic probe
aataaaaacccaaaacccaacacctcaaaataaccttataatcaaaaaca

SEQ ID NO: 2199 - DNA, 50 bp, Artificial Sequence
  Description of Artificial Sequence: Synthetic probe
ccatctcaaaataaaaaacttaaacaacccctcatactacacataacaca

SEQ ID NO: 2200 - DNA, 50 bp, Artificial Sequence
  Description of Artificial Sequence: Synthetic probe
catatctcttaaaaaaacaaaaacctctctaaaaaacttcaacaaaatca

SEQ ID NO: 2201 - DNA, 50 bp, Artificial Sequence
  Description of Artificial Sequence: Synthetic probe
ctctaaaaaacttcaacaaaatcaatactaaaaactaaaaatcaaaaaca

SEQ ID NO: 2202 - DNA, 50 bp, Artificial Sequence
  Description of Artificial Sequence: Synthetic probe
ctccaataactacaactccaaaaaaaaccaaaccaacaacaatacccaca

SEQ ID NO: 2203 - DNA, 50 bp, Artificial Sequence
  Description of Artificial Sequence: Synthetic probe
aaaccacaactccaataactacaactccaaaaaaaaccaaaccaacaaca

SEQ ID NO: 2204 - DNA, 50 bp, Artificial Sequence
  Description of Artificial Sequence: Synthetic probe
tctcctctaaactctaaccaaatcctatttttattctaccccaaacaaca

SEQ ID NO: 2205 - DNA, 50 bp, Artificial Sequence
  Description of Artificial Sequence: Synthetic probe
gttttatttttataagttgtgagagatatattagaattttgtgtatggtt

SEQ ID NO: 2206 - DNA, 50 bp, Artificial Sequence
  Description of Artificial Sequence: Synthetic probe
aaactctaaccaaatcctatttttattctaccccaaacaacaaccataca

SEQ ID NO: 2207 - DNA, 50 bp, Artificial Sequence
  Description of Artificial Sequence: Synthetic probe
ccccaatatctcacctttacaaaccataaaaaacacatcaaaaccctaca

SEQ ID NO: 2208 - DNA, 50 bp, Artificial Sequence
  Description of Artificial Sequence: Synthetic probe
attctaccccaaacaacaaccatacacaaaattctaatatatctctcaca

SEQ ID NO: 2209 - DNA, 50 bp, Artificial Sequence
  Description of Artificial Sequence: Synthetic probe
tgttttattttaggtagtgattatgtgtagggttttgatgtgttttttat

SEQ ID NO: 2210 - DNA, 50 bp, Artificial Sequence
  Description of Artificial Sequence: Synthetic probe
aataaaacttacaaaaaccaaaaaataaacctaaacaaattataccccac

SEQ ID NO: 2211 - DNA, 50 bp, Artificial Sequence
  Description of Artificial Sequence: Synthetic probe
ataaaacttacaaaaaccaaaaaataaacctaaacaaattataccccaca

SEQ ID NO: 2212 - DNA, 50 bp, Artificial Sequence
  Description of Artificial Sequence: Synthetic probe
agtggggtttatagaggttagggaataaatttggataaattatgttttat

SEQ ID NO: 2213 - DNA, 50 bp, Artificial Sequence
  Description of Artificial Sequence: Synthetic probe
ttatctccccattctctataaaaaaaattctctataaaaaaattacatca

SEQ ID NO: 2214 - DNA, 50 bp, Artificial Sequence
  Description of Artificial Sequence: Synthetic probe
aaaccaccataaccaccacaatccaaaaactcaaatcctaatttaaaaca

SEQ ID NO: 2215 - DNA, 50 bp, Artificial Sequence
  Description of Artificial Sequence: Synthetic probe
aaaaaaattacatcaccctaaaccaaaacctaaactcttaaactacaaca

SEQ ID NO: 2216 - DNA, 50 bp, Artificial Sequence
  Description of Artificial Sequence: Synthetic probe
ccataacaactcaaattacccaacacaaataaaaaacaacccataaaaca

SEQ ID NO: 2217 - DNA, 50 bp, Artificial Sequence
  Description of Artificial Sequence: Synthetic probe
atttccataactaaaaaaaatatattttataaccattcacaataatcaca

SEQ ID NO: 2218 - DNA, 50 bp, Artificial Sequence
  Description of Artificial Sequence: Synthetic probe
atttcaccttattaaccaaaattatctcaacctcctaacctcataatcca

SEQ ID NO: 2219 - DNA, 50 bp, Artificial Sequence
  Description of Artificial Sequence: Synthetic probe
gtttaggttggggtatagtggtttaatgatttttgtttattataagtttt

SEQ ID NO: 2220 - DNA, 50 bp, Artificial Sequence
  Description of Artificial Sequence: Synthetic probe
ctccattctaaacttccaaaaactatattttcattttaaatcctccttca

SEQ ID NO: 2221 - DNA, 50 bp, Artificial Sequence
  Description of Artificial Sequence: Synthetic probe
caatcttacaactacaaaaaactacattctaccacctctatataaaccca

SEQ ID NO: 2222 - DNA, 50 bp, Artificial Sequence
  Description of Artificial Sequence: Synthetic probe
tatttcattcattaaatcaacaaaaattaacttaatccctacaataaaca

SEQ ID NO: 2223 - DNA, 50 bp, Artificial Sequence
  Description of Artificial Sequence: Synthetic probe
taacctactacrtaactattcttttcacaataaccctactcctataaatc

SEQ ID NO: 2224 - DNA, 50 bp, Artificial Sequence
  Description of Artificial Sequence: Synthetic probe
aacctactacataactattcttttcacaataaccctactcctataaatca

SEQ ID NO: 2225 - DNA, 50 bp, Artificial Sequence
  Description of Artificial Sequence: Synthetic probe
actttaaatttaccatcattccttaactctaaatttctatataaatccac

SEQ ID NO: 2226 - DNA, 50 bp, Artificial Sequence; identical to SEQ ID NO: 2225
  Description of Artificial Sequence: Synthetic probe

SEQ ID NO: 2227 - DNA, 50 bp, Artificial Sequence
  Description of Artificial Sequence: Synthetic probe
ctttaaatttaccatcattccttaactctaaatttctatataaatccaca

SEQ ID NO: 2228 - DNA, 50 bp, Artificial Sequence; identical to SEQ ID NO: 2227
  Description of Artificial Sequence: Synthetic probe

SEQ ID NO: 2229 - DNA, 50 bp, Artificial Sequence; identical to SEQ ID NO: 2227
  Description of Artificial Sequence: Synthetic probe

SEQ ID NO: 2230 - DNA, 50 bp, Artificial Sequence; identical to SEQ ID NO: 2227
  Description of Artificial Sequence: Synthetic probe

SEQ ID NO: 2231 - DNA, 50 bp, Artificial Sequence
  Description of Artificial Sequence: Synthetic probe
ttggttgtaatatataggaatatagtggttattttgtattgaggagatgt

SEQ ID NO: 2232 - DNA, 50 bp, Artificial Sequence
  Description of Artificial Sequence: Synthetic probe
tggttgtaatatataggaatatagtggttattttgtattgaggagatgtt

SEQ ID NO: 2233 - DNA, 50 bp, Artificial Sequence; identical to SEQ ID NO: 2232
  Description of Artificial Sequence: Synthetic probe

SEQ ID NO: 2234 - DNA, 50 bp, Artificial Sequence; identical to SEQ ID NO: 2232
  Description of Artificial Sequence: Synthetic probe

SEQ ID NO: 2235 - DNA, 50 bp, Artificial Sequence; identical to SEQ ID NO: 2232
  Description of Artificial Sequence: Synthetic probe

SEQ ID NO: 2236 - DNA, 50 bp, Artificial Sequence
  Description of Artificial Sequence: Synthetic probe
aaacaactcctaaaccaaaactcaaaaaaacattaaaacaaaacacttca

SEQ ID NO: 2237 - DNA, 50 bp, Artificial Sequence
  Description of Artificial Sequence: Synthetic probe
aattaaaaaatccccaaaactaaaactccccaatccatacaccaccttca

SEQ ID NO: 2238 - DNA, 50 bp, Artificial Sequence
  Description of Artificial Sequence: Synthetic probe
aaataaaaactaaatccacatcataaatatccaaaataaaaaaccctaca

SEQ ID NO: 2239 - DNA, 50 bp, Artificial Sequence
  Description of Artificial Sequence: Synthetic probe
attctcactcccattaaatatcaaatttccaaaaaaaccaatcaatatca

SEQ ID NO: 2240 - DNA, 50 bp, Artificial Sequence
  Description of Artificial Sequence: Synthetic probe
aatctaaatcccaataaatacatacaaactttaaaacaacaaccacaaca

SEQ ID NO: 2241 - DNA, 50 bp, Artificial Sequence
  Description of Artificial Sequence: Synthetic probe
ctcactcccattaaatatcaaatttccaaaaaaaccaatcaatatcatca

SEQ ID NO: 2242 - DNA, 50 bp, Artificial Sequence
  Description of Artificial Sequence: Synthetic probe
aaaaatctaaatcccaataaatacatacaaactttaaaacaacaaccaca

SEQ ID NO: 2243 - DNA, 50 bp, Artificial Sequence
  Description of Artificial Sequence: Synthetic probe
aatttccaaaaaaaccaatcaatatcrtcrcratcrctattctaaaaccc

SEQ ID NO: 2244 - DNA, 50 bp, Artificial Sequence
  Description of Artificial Sequence: Synthetic probe
atttccaaaaaaaccaatcaatatcatcacaatcactattctaaaaccca

SEQ ID NO: 2245 - DNA, 50 bp, Artificial Sequence
  Description of Artificial Sequence: Synthetic probe
ctcaaaaaccctaaccctaacccaaacctaaacaaataaatacaaaatca

SEQ ID NO: 2246 - DNA, 50 bp, Artificial Sequence
  Description of Artificial Sequence: Synthetic probe
taaaataaaaacctaaaaacaaacaataactaaaacctacccaaccctca

SEQ ID NO: 2247 - DNA, 50 bp, Artificial Sequence
  Description of Artificial Sequence: Synthetic probe
tacctcataaaataaaaacctaaaaacaaacaataactaaaacctaccca

SEQ ID NO: 2248 - DNA, 50 bp, Artificial Sequence
  Description of Artificial Sequence: Synthetic probe
aatctataactaaaccttcacattccatatctcctaatcccaatactcca

SEQ ID NO: 2249 - DNA, 50 bp, Artificial Sequence
  Description of Artificial Sequence: Synthetic probe
aaaatccccaaatccactcaatcaatctataactaaaccttcacattcca

SEQ ID NO: 2250 - DNA, 50 bp, Artificial Sequence
  Description of Artificial Sequence: Synthetic probe
ttaacctaaactaaaaataaaaccaaataaaaacacctaaacctctccca

SEQ ID NO: 2251 - DNA, 50 bp, Artificial Sequence
  Description of Artificial Sequence: Synthetic probe
aacccaaaaaaatttttaacctaaactaaaaataaaaccaaataaaaaca

SEQ ID NO: 2252 - DNA, 50 bp, Artificial Sequence
  Description of Artificial Sequence: Synthetic probe
tgttgtagttatatattatttggatggtgtgagaatttggttttgatttt

SEQ ID NO: 2253 - DNA, 50 bp, Artificial Sequence
  Description of Artificial Sequence: Synthetic probe
atcacaaccatacattatctaaataatataaaaacctaaccccaacccca

SEQ ID NO: 2254 - DNA, 50 bp, Artificial Sequence
  Description of Artificial Sequence: Synthetic probe
cacaaaatcaaaaccaaattctcacaccatccaaataatatataactaca

SEQ ID NO: 2255 - DNA, 50 bp, Artificial Sequence
  Description of Artificial Sequence: Synthetic probe
aaaatcaaaaccaaattctcacaccatccaaataatatataactacaaca

SEQ ID NO: 2256 - DNA, 50 bp, Artificial Sequence
  Description of Artificial Sequence: Synthetic probe
ttatgtatgtgttatttaggtaggtttttaattgttttgttttatgggtt

SEQ ID NO: 2257 - DNA, 50 bp, Artificial Sequence
  Description of Artificial Sequence: Synthetic probe
acataacaactcaaatcaccaaacacaaataaaaaacaacccataaaaca

SEQ ID NO: 2258 - DNA, 50 bp, Artificial Sequence
  Description of Artificial Sequence: Synthetic probe
acaaaacaattaaaaacctacctaaataacacatacataaaataactcca

SEQ ID NO: 2259 - DNA, 50 bp, Artificial Sequence
  Description of Artificial Sequence: Synthetic probe
aacaaaaaaacaatccctcaaatactaataaataattccctttaacacca

SEQ ID NO: 2260 - DNA, 50 bp, Artificial Sequence
  Description of Artificial Sequence: Synthetic probe
caaatactaataaataattccctttaacaccaacaacaaccttaaaccca

SEQ ID NO: 2261 - DNA, 50 bp, Artificial Sequence
  Description of Artificial Sequence: Synthetic probe
tatatatattgagtgtgaagtagagaataaggtttgagaggaaaagttat

SEQ ID NO: 2262 - DNA, 50 bp, Artificial Sequence
  Description of Artificial Sequence: Synthetic probe
tacctatatccaaactaatatctaaattctatactctcttccccatccca

SEQ ID NO: 2263 - DNA, 50 bp, Artificial Sequence
  Description of Artificial Sequence: Synthetic probe
gttttagtgattatagttttaaggagaattaggttagtaatgatgtttat

SEQ ID NO: 2264 - DNA, 50 bp, Artificial Sequence
  Description of Artificial Sequence: Synthetic probe
cattactaacctaattctccttaaaactataatcactaaaactataatca

SEQ ID NO: 2265 - DNA, 50 bp, Artificial Sequence
  Description of Artificial Sequence: Synthetic probe
taacctaattctccttaaaactataatcactaaaactataatcactacca

SEQ ID NO: 2266 - DNA, 50 bp, Artificial Sequence
  Description of Artificial Sequence: Synthetic probe
taaatactaacacacaaaacccaaactaaataaacccataattataaaca

SEQ ID NO: 2267 - DNA, 50 bp, Artificial Sequence
  Description of Artificial Sequence: Synthetic probe
gttttaagttttagttagaaatgtgttttgttttattattgggaagtatt

SEQ ID NO: 2268 - DNA, 50 bp, Artificial Sequence
  Description of Artificial Sequence: Synthetic probe
aaccttcccctataacttataactactaaaatcaaatcccatcaccacca

SEQ ID NO: 2269 - DNA, 50 bp, Artificial Sequence
  Description of Artificial Sequence: Synthetic probe
aaaaaccttcccctataacttataactactaaaatcaaatcccatcacca

SEQ ID NO: 2270 - DNA, 50 bp, Artificial Sequence
  Description of Artificial Sequence: Synthetic probe
ataaaacacctattaaaataaaaaacaaatttatcaccttaattacaaca

SEQ ID NO: 2271 - DNA, 50 bp, Artificial Sequence
  Description of Artificial Sequence: Synthetic probe
acaaattcatatccatcacaataaaaaatcacaccttaaacaacccatca

SEQ ID NO: 2272 - DNA, 50 bp, Artificial Sequence
  Description of Artificial Sequence: Synthetic probe
aacacaactatactataaaatttctttacattaaatatattaaacataca

SEQ ID NO: 2273 - DNA, 50 bp, Artificial Sequence
  Description of Artificial Sequence: Synthetic probe
tctctactactctatcactactaaattacaaccctaactctatcccctca

SEQ ID NO: 2274 - DNA, 50 bp, Artificial Sequence
  Description of Artificial Sequence: Synthetic probe
ttaacaaaatttctaaccattattaaaaaaacaatcataaacaacaaaca

SEQ ID NO: 2275 - DNA, 50 bp, Artificial Sequence
  Description of Artificial Sequence: Synthetic probe
attaccctaactaaaatactataacacattcataactcactaaaacctca

SEQ ID NO: 2276 - DNA, 50 bp, Artificial Sequence
  Description of Artificial Sequence: Synthetic probe
acattaatcacataaacccaaaaaatcaaaacttcaataaatcataaaca

SEQ ID NO: 2277 - DNA, 50 bp, Artificial Sequence
  Description of Artificial Sequence: Synthetic probe
tttttaaaccaaatatcactctattaccctaactaaaatactataacaca

SEQ ID NO: 2278 - DNA, 50 bp, Artificial Sequence
  Description of Artificial Sequence: Synthetic probe
aatcataaacataccacaacactccaactaaaacaacaaaataatactca

SEQ ID NO: 2279 - DNA, 50 bp, Artificial Sequence
  Description of Artificial Sequence: Synthetic probe
acaccacctttatttatcatttatttaattaattaattatttttaaacca

SEQ ID NO: 2280 - DNA, 50 bp, Artificial Sequence
  Description of Artificial Sequence: Synthetic probe
tacaaatactcaatacaaccaaaatacccttcaccaatactcatacacca

SEQ ID NO: 2281 - DNA, 50 bp, Artificial Sequence
  Description of Artificial Sequence: Synthetic probe
catttatatataataaaaccaaaaatcacctcttttacaaattaaattca

SEQ ID NO: 2282 - DNA, 50 bp, Artificial Sequence
  Description of Artificial Sequence: Synthetic probe
gtagtgtagtatagtggttagtataattttggtagtttttgaatggttat

SEQ ID NO: 2283 - DNA, 50 bp, Artificial Sequence
  Description of Artificial Sequence: Synthetic probe
ataaaatccaatataaacacctaaaacttttattaaataaaaaatctcca

SEQ ID NO: 2284 - DNA, 50 bp, Artificial Sequence
  Description of Artificial Sequence: Synthetic probe
tacactacccactattactaaaattatactactccactacaaaaccaaca

SEQ ID NO: 2285 - DNA, 50 bp, Artificial Sequence
  Description of Artificial Sequence: Synthetic probe
aattcaaacccaaatccccaaaaattaatcaaaactaaaacaaaactcca

SEQ ID NO: 2286 - DNA, 50 bp, Artificial Sequence
  Description of Artificial Sequence: Synthetic probe
tcaaacccaaatccccaaaaattaatcaaaactaaaacaaaactccatca

SEQ ID NO: 2287 - DNA, 50 bp, Artificial Sequence
  Description of Artificial Sequence: Synthetic probe
tccccaaaaattaatcaaaactaaaacaaaactccatcaaaactaaaaca

SEQ ID NO: 2288 - DNA, 50 bp, Artificial Sequence
  Description of Artificial Sequence: Synthetic probe
cacaactatatacccattaaaaaatataaaacccattcccaacaactaca

SEQ ID NO: 2289 - DNA, 50 bp, Artificial Sequence
  Description of Artificial Sequence: Synthetic probe
aacaaaactccatcaaaactaaaacaaaactcaacaacctaaactaacca

SEQ ID NO: 2290 - DNA, 50 bp, Artificial Sequence
  Description of Artificial Sequence: Synthetic probe
ccacatcacaactatatacccattaaaaaatataaaacccattcccaaca

SEQ ID NO: 2291 - DNA, 50 bp, Artificial Sequence
  Description of Artificial Sequence: Synthetic probe
aaaataaatctcacacccttcaataaatacacaactacaacataaactca

SEQ ID NO: 2292 - DNA, 50 bp, Artificial Sequence
  Description of Artificial Sequence: Synthetic probe
ctaacaccataataaaatatattcatacccactaaaaaaactacaatcca

SEQ ID NO: 2293 - DNA, 50 bp, Artificial Sequence
  Description of Artificial Sequence: Synthetic probe
ataaactcaaactacaatctcctcaataaatataaacataccctatcaca

SEQ ID NO: 2294 - DNA, 50 bp, Artificial Sequence
  Description of Artificial Sequence: Synthetic probe
ctacaatccaaaaacacaattcctaatttcaaacaaaataactaacacca

SEQ ID NO: 2295 - DNA, 50 bp, Artificial Sequence
  Description of Artificial Sequence: Synthetic probe
tgtggatttggattgtagtttttttagtgggtatgaatatattttattat

SEQ ID NO: 2296 - DNA, 50 bp, Artificial Sequence
  Description of Artificial Sequence: Synthetic probe
aactcaaactacaatctcctcaataaatataaacataccctatcacaaca

SEQ ID NO: 2297 - DNA, 50 bp, Artificial Sequence
  Description of Artificial Sequence: Synthetic probe
aataaattttaaacaactctacctattcctccaccaaaacatctaaacca

SEQ ID NO: 2298 - DNA, 50 bp, Artificial Sequence
  Description of Artificial Sequence: Synthetic probe
aaactacactcttaaactacaacaaacaaaacaactcaaataccctaaca

SEQ ID NO: 2299 - DNA, 50 bp, Artificial Sequence
  Description of Artificial Sequence: Synthetic probe
acactacaacctctccttcccattcttaaaaactttactaaaccactcca

SEQ ID NO: 2300 - DNA, 50 bp, Artificial Sequence
  Description of Artificial Sequence: Synthetic probe
caaaaaaacaaacaaaactactcaaaacctacctacaaaaaaaataaaca

SEQ ID NO: 2301 - DNA, 50 bp, Artificial Sequence
  Description of Artificial Sequence: Synthetic probe
aatacaaaacaaaccctcaatcactctctaatataaaatctaaaaaccca

SEQ ID NO: 2302 - DNA, 50 bp, Artificial Sequence
  Description of Artificial Sequence: Synthetic probe
tgtagtttttgagggaaaggaggggaagataatttttgaaatattgattt

SEQ ID NO: 2303 - DNA, 50 bp, Artificial Sequence
  Description of Artificial Sequence: Synthetic probe
ctcacactcaatatatatttataaatctaattccaacttttttaacctca

SEQ ID NO: 2304 - DNA, 50 bp, Artificial Sequence
  Description of Artificial Sequence: Synthetic probe
atatctaaaaccaaaacaaaaatttctaatcctaacctaaacaaaaacca

SEQ ID NO: 2305 - DNA, 50 bp, Artificial Sequence
  Description of Artificial Sequence: Synthetic probe
aattttaatatctaaaaccaaaacaaaaatttctaatcctaacctaaaca

SEQ ID NO: 2306 - DNA, 50 bp, Artificial Sequence
  Description of Artificial Sequence: Synthetic probe
tcaatatatatttataaatctaattccaacttttttaacctcaacctcca

SEQ ID NO: 2307 - DNA, 50 bp, Artificial Sequence
  Description of Artificial Sequence: Synthetic probe
ttttttaacctcaacctccactcaaatcaaaaccaaaaatctctattcca

SEQ ID NO: 2308 - DNA, 50 bp, Artificial Sequence
  Description of Artificial Sequence: Synthetic probe
acattcctcataaaacattccacctcataaaaccatcctaaaaattaaca

SEQ ID NO: 2309 - DNA, 50 bp, Artificial Sequence
  Description of Artificial Sequence: Synthetic probe
gttttaaattttgattttgttgaagggttttagaagggtttttagttttt

SEQ ID NO: 2310 - DNA, 50 bp, Artificial Sequence
  Description of Artificial Sequence: Synthetic probe
cctcaaaccctaaccttactaaaaaactccaaaaaaactcctaattccca

SEQ ID NO: 2311 - DNA, 50 bp, Artificial Sequence
  Description of Artificial Sequence: Synthetic probe
acccttcaacaaaatcaaaatttaaaacctaataatcaaaacccctcaca

SEQ ID NO: 2312 - DNA, 50 bp, Artificial Sequence
  Description of Artificial Sequence: Synthetic probe
aaaatatattaaaactaaactaattatcctaataaaatctatcctctaca

SEQ ID NO: 2313 - DNA, 50 bp, Artificial Sequence
  Description of Artificial Sequence: Synthetic probe
aatcataaaaacctaactcccaacaatcacaaatcaaaaaaaaataccca

SEQ ID NO: 2314 - DNA, 50 bp, Artificial Sequence
  Description of Artificial Sequence: Synthetic probe
ttacaaaccttaaaaaacacatcaaaaccctaaatactatccctatttca

SEQ ID NO: 2315 - DNA, 50 bp, Artificial Sequence
  Description of Artificial Sequence: Synthetic probe
taatcacatcatctataaactctaaccaaattttatttttattccaccca

SEQ ID NO: 2316 - DNA, 50 bp, Artificial Sequence
  Description of Artificial Sequence: Synthetic probe
aatatactctcttttattttttaaaatatccactaccaaaaataatccac

SEQ ID NO: 2317 - DNA, 50 bp, Artificial Sequence
  Description of Artificial Sequence: Synthetic probe
tcaacataaaactccaacatataaatttcrattaaaaaaaaacacaattc

SEQ ID NO: 2318 - DNA, 50 bp, Artificial Sequence
  Description of Artificial Sequence: Synthetic probe
ttattttttaaaatatccactaccaaaaataatccacrctattataaaac

SEQ ID NO: 2319 - DNA, 50 bp, Artificial Sequence
  Description of Artificial Sequence: Synthetic probe
tttaatataggattttaatatatgaatttyggttggggagggatataatt

SEQ ID NO: 2320 - DNA, 50 bp, Artificial Sequence
  Description of Artificial Sequence: Synthetic probe
taaataaccacttctatcttctcaacataaaactccaacatataaatttc

SEQ ID NO: 2321 - DNA, 50 bp, Artificial Sequence
  Description of Artificial Sequence: Synthetic probe
ctcctatatcaactcctcaaatattaaaattacaaaaatacaccaccaca

SEQ ID NO: 2322 - DNA, 50 bp, Artificial Sequence
  Description of Artificial Sequence: Synthetic probe
tttttgattaaggtattataaatagataaatgggtgttttttggttaggt

SEQ ID NO: 2323 - DNA, 50 bp, Artificial Sequence
  Description of Artificial Sequence: Synthetic probe
ccaaaaatttaaaactacaataaaccataatcatataactacacttcaca

SEQ ID NO: 2324 - DNA, 50 bp, Artificial Sequence
  Description of Artificial Sequence: Synthetic probe
aacacactttaactcacattaacaaaaccactataaaaaaaacaatcaca

SEQ ID NO: 2325 - DNA, 50 bp, Artificial Sequence
  Description of Artificial Sequence: Synthetic probe
ctcacattaacaaaaccactataaaaaaaacaatcacataacaaataaca

SEQ ID NO: 2326 - DNA, 50 bp, Artificial Sequence
  Description of Artificial Sequence: Synthetic probe
taatccccatcacactatcactcctaaattataacactaacactctccca

SEQ ID NO: 2327 - DNA, 50 bp, Artificial Sequence
  Description of Artificial Sequence: Synthetic probe
atttatattagtaggattattgtggagagaatagttatgtagtaggtaat

SEQ ID NO: 2328 - DNA, 50 bp, Artificial Sequence
  Description of Artificial Sequence: Synthetic probe
acttttcatccaaaaattcctatccctaaaataaactccctacttcccca

SEQ ID NO: 2329 - DNA, 50 bp, Artificial Sequence
  Description of Artificial Sequence: Synthetic probe
aaacaatacataaactaaaaaaatacaacattaaaaattccccatctcca

SEQ ID NO: 2330 - DNA, 50 bp, Artificial Sequence
  Description of Artificial Sequence: Synthetic probe
attctcactcccactaaatatcaaatttctaaaaaaaccaatcaacatca

SEQ ID NO: 2331 - DNA, 50 bp, Artificial Sequence
  Description of Artificial Sequence: Synthetic probe
tctcactcccactaaatatcaaatttctaaaaaaaccaatcaacatcaca

SEQ ID NO: 2332 - DNA, 50 bp, Artificial Sequence
  Description of Artificial Sequence: Synthetic probe
cataaaaaacaaaaaatccacctaactaaaacacaaaacccaaaaaacca

SEQ ID NO: 2333 - DNA, 50 bp, Artificial Sequence
  Description of Artificial Sequence: Synthetic probe
caaaaaacccaacttcattaccataaactacataaacaacacacaattca

SEQ ID NO: 2334 - DNA, 50 bp, Artificial Sequence
  Description of Artificial Sequence: Synthetic probe
tcatacaaatcaacaataacaccataaatctaaaaataaaaacacaaaca

SEQ ID NO: 2335 - DNA, 50 bp, Artificial Sequence
  Description of Artificial Sequence: Synthetic probe
cacaacctcaaaatcaatcttaaacccaaaaactcaaaaaaccaaaacca

SEQ ID NO: 2336 - DNA, 50 bp, Artificial Sequence
  Description of Artificial Sequence: Synthetic probe
ttaacctcaactaaaaataaaaccaaataaaaacacctaaaactctccca

SEQ ID NO: 2337 - DNA, 50 bp, Artificial Sequence
  Description of Artificial Sequence: Synthetic probe
tttggttttaattgaagatgaaattaggtaaaggtgtttggggttttttt

SEQ ID NO: 2338 - DNA, 50 bp, Artificial Sequence
  Description of Artificial Sequence: Synthetic probe
taatttcatcttcaattaaaaccaaaatctccacaaattactaaaaacca

SEQ ID NO: 2339 - DNA, 50 bp, Artificial Sequence
  Description of Artificial Sequence: Synthetic probe
cacaaaaactaaaccaaaatatcacatcctccaaaaaatatttaactaca

SEQ ID NO: 2340 - DNA, 50 bp, Artificial Sequence
  Description of Artificial Sequence: Synthetic probe
accaaaatatcacatcctccaaaaaatatttaactacaacctaaaaccca

SEQ ID NO: 2341 - DNA, 50 bp, Artificial Sequence
  Description of Artificial Sequence: Synthetic probe
cattcaaaacaatataatccttaccatcataaacatactactcataccca

SEQ ID NO: 2342 - DNA, 50 bp, Artificial Sequence
  Description of Artificial Sequence: Synthetic probe
tacttacactaaataatctaaaccacaatatccacaacaatccaaaaaca

SEQ ID NO: 2343 - DNA, 50 bp, Artificial Sequence
  Description of Artificial Sequence: Synthetic probe
tccaaataaactctcctttactcaaccacattaaccacctcatacttaca

SEQ ID NO: 2344 - DNA, 50 bp, Artificial Sequence
  Description of Artificial Sequence: Synthetic probe
caaaaaatctacaaaaaatcaaacaaactccccataacccctaataccca

SEQ ID NO: 2345 - DNA, 50 bp, Artificial Sequence
  Description of Artificial Sequence: Synthetic probe
tttcttcccctccttatacaaaaccaacccaaaaaatctacaaaaaatca

SEQ ID NO: 2346 - DNA, 50 bp, Artificial Sequence
  Description of Artificial Sequence: Synthetic probe
aaaaaaacactacaacacacaaataccaaaaaccataaaaaacctactca

SEQ ID NO: 2347 - DNA, 50 bp, Artificial Sequence
  Description of Artificial Sequence: Synthetic probe
aaaatcaatctctaatacaaaatctaaaaacccaaaaaaattcctctcca

SEQ ID NO: 2348 - DNA, 50 bp, Artificial Sequence
  Description of Artificial Sequence: Synthetic probe
aaacactactaaaatatcccataaaaaatacaaaatacctaaattttcca

SEQ ID NO: 2349 - DNA, 50 bp, Artificial Sequence
  Description of Artificial Sequence: Synthetic probe
gttaggttaatgtgatttttgtagggtagaagtttagaatttaggatttt

SEQ ID NO: 2350 - DNA, 50 bp, Artificial Sequence
  Description of Artificial Sequence: Synthetic probe
ccaaatcaatataatctccacaaaataaaaacccaaaacccaaaacctca

SEQ ID NO: 2351 - DNA, 50 bp, Artificial Sequence
  Description of Artificial Sequence: Synthetic probe
ttttgaatatgaggtataatgaggttttgggttttgggtttttattttgt

SEQ ID NO: 2352 - DNA, 50 bp, Artificial Sequence
  Description of Artificial Sequence: Synthetic probe
tctaaacataaaacataacaaaatcctaaattctaaacttctaccctaca

SEQ ID NO: 2353 - DNA, 50 bp, Artificial Sequence
  Description of Artificial Sequence: Synthetic probe
aactcataaaaaccaaacccacaaaaaataaaaccttccaaaaataaaca

SEQ ID NO: 2354 - DNA, 50 bp, Artificial Sequence
  Description of Artificial Sequence: Synthetic probe
ctactaaaaatctccaaaaaaactcctactttccctaaaaaacataacca

SEQ ID NO: 2355 - DNA, 50 bp, Artificial Sequence
  Description of Artificial Sequence: Synthetic probe
tttctacctaaaacttaaaacccccaataaaacaaaaaaactcaaaccca

SEQ ID NO: 2356 - DNA, 50 bp, Artificial Sequence
  Description of Artificial Sequence: Synthetic probe
ccactaaaaatttcaaactccaaataaaaatatattctacctaattacca

SEQ ID NO: 2357 - DNA, 50 bp, Artificial Sequence
  Description of Artificial Sequence: Synthetic probe
cacacaaaacccaaactaaataaacccataaatataaataatacttccca

SEQ ID NO: 2358 - DNA, 50 bp, Artificial Sequence
  Description of Artificial Sequence: Synthetic probe
atatccctataaacataatataaaataataaaaaaaccaacccacaccca

SEQ ID NO: 2359 - DNA, 50 bp, Artificial Sequence
  Description of Artificial Sequence: Synthetic probe
aatatagaattttatattaagtttaggttggaataagtgttagggtagtt

SEQ ID NO: 2360 - DNA, 50 bp, Artificial Sequence
  Description of Artificial Sequence: Synthetic probe
atacaaaattccataccaaatccaaattaaaataaatactaaaataaccc

SEQ ID NO: 2361 - DNA, 50 bp, Artificial Sequence
  Description of Artificial Sequence: Synthetic probe
aatatatattaattatttcataaatattaatttccccacttaaaaaaacc

SEQ ID NO: 2362 - DNA, 50 bp, Artificial Sequence
  Description of Artificial Sequence: Synthetic probe
tcttctcaaaattctctccttaaatctttattctacaaattctctccctc

SEQ ID NO: 2363 - DNA, 50 bp, Artificial Sequence
  Description of Artificial Sequence: Synthetic probe
taaatgagagggaatagatgtagattaaggattattaggaaygtatgatt

SEQ ID NO: 2364 - DNA, 50 bp, Artificial Sequence
  Description of Artificial Sequence: Synthetic probe
ataaaacaaaattaccaaaaattataccaaaaaaacataacatccaaaac

SEQ ID NO: 2365 - DNA, 50 bp, Artificial Sequence
  Description of Artificial Sequence: Synthetic probe
ccatatctaatttataaatctaaatataattacatactaccaacatattc

SEQ ID NO: 2366 - DNA, 50 bp, Artificial Sequence
  Description of Artificial Sequence: Synthetic probe
aatttacraccatttctctacttcatcctactcatcaccccaaaaaaaac

SEQ ID NO: 2367 - DNA, 50 bp, Artificial Sequence
  Description of Artificial Sequence: Synthetic probe
aaaaaaataaaccacrataaaatcattactattactccttaaacttcctc

SEQ ID NO: 2368 - DNA, 50 bp, Artificial Sequence
  Description of Artificial Sequence: Synthetic probe
tttctcacraactcrattatcacrataaccrttatctcaataacratctc

SEQ ID NO: 2369 - DNA, 50 bp, Artificial Sequence
  Description of Artificial Sequence: Synthetic probe
cctccctatcctaaaccttaaccataaccraaacaaaaactaaactaaac

SEQ ID NO: 2370 - DNA, 50 bp, Artificial Sequence
  Description of Artificial Sequence: Synthetic probe
tttcctaataattcaatatttctaaaaaaacataaatctttccacccccc

SEQ ID NO: 2371 - DNA, 50 bp, Artificial Sequence
  Description of Artificial Sequence: Synthetic probe
ttaaattacatatataactcactttacrtttatattaaataacattactc

SEQ ID NO: 2372 - DNA, 50 bp, Artificial Sequence
  Description of Artificial Sequence: Synthetic probe
atttttaaatttataaaaaacctttaaaatccratatattaaccraacrc

SEQ ID NO: 2373 - DNA, 50 bp, Artificial Sequence
  Description of Artificial Sequence: Synthetic probe
aaatactaaaccctaaataaatataattaaaactaattatctaactaatc

SEQ ID NO: 2374 - DNA, 50 bp, Artificial Sequence
  Description of Artificial Sequence: Synthetic probe
actaaaaaattctaaataattcraaacrccctaaaatttaaacccactcc

SEQ ID NO: 2375 - DNA, 50 bp, Artificial Sequence
  Description of Artificial Sequence: Synthetic probe
aacccacrcraattccctttccctaaaatcraatcacacttacataaatc

SEQ ID NO: 2376 - DNA, 50 bp, Artificial Sequence
  Description of Artificial Sequence: Synthetic probe
ttcttctccccacaaaatcrtctcaaaaatcractaaaaactctaaacac

SEQ ID NO: 2377 - DNA, 50 bp, Artificial Sequence
  Description of Artificial Sequence: Synthetic probe
tgtaaagtgttaagaagattagaagttttaagtgttgttggtataggtta

SEQ ID NO: 2378 - DNA, 50 bp, Artificial Sequence
  Description of Artificial Sequence: Synthetic probe
ataaaatatcaaaaaaaccaaaaacttcaaatactactaatacaaaccac

SEQ ID NO: 2379 - DNA, 50 bp, Artificial Sequence
  Description of Artificial Sequence: Synthetic probe
atttaaaaacacttcctaattcataaaccctaaatttatcctccctacac

SEQ ID NO: 2380 - DNA, 50 bp, Artificial Sequence
  Description of Artificial Sequence: Synthetic probe
gagaggtgtagtgattagggaataattgttaygtgttttgtgtttatttt

SEQ ID NO: 2381 - DNA, 50 bp, Artificial Sequence
  Description of Artificial Sequence: Synthetic probe
aaaaatataataactaaaaaacaattatcacrtactttatacctattccc

SEQ ID NO: 2382 - DNA, 50 bp, Artificial Sequence
  Description of Artificial Sequence: Synthetic probe
atttgaaaatatgagagttatatattagaaattattaggttttggtyggg

SEQ ID NO: 2383 - DNA, 50 bp, Artificial Sequence
  Description of Artificial Sequence: Synthetic probe
tctaaaaacataaaaactacatattaaaaaccactaaattttaaccraac

SEQ ID NO: 2384 - DNA, 50 bp, Artificial Sequence
  Description of Artificial Sequence: Synthetic probe
ctcatctaaaaacataaaaactacatattaaaaaccactaaattttaacc

SEQ ID NO: 2385 - DNA, 50 bp, Artificial Sequence
  Description of Artificial Sequence: Synthetic probe
attatccaaaatcttctaaaatactcccacttaattacatatataaaacc

SEQ ID NO: 2386 - DNA, 50 bp, Artificial Sequence
  Description of Artificial Sequence: Synthetic probe
caaaatcttctaaaatactcccacttaattacatatataaaaccraacrc

SEQ ID NO: 2387 - DNA, 50 bp, Artificial Sequence
  Description of Artificial Sequence: Synthetic probe
caaaactaactacctaaaattaacattcatctaacactacaaaccaaaac

SEQ ID NO: 2388 - DNA, 50 bp, Artificial Sequence
  Description of Artificial Sequence: Synthetic probe
accttttttctcaaaatccaaaatcccttccaaaacactactcaaaacac

SEQ ID NO: 2389 - DNA, 50 bp, Artificial Sequence
  Description of Artificial Sequence: Synthetic probe
aaatacaacttaatattacctaaacttcaccataaaaaatcaaaaaatca

SEQ ID NO: 2390 - DNA, 50 bp, Artificial Sequence
  Description of Artificial Sequence: Synthetic probe
ataattaaattttaatctaccattttactatatattttcaatttatctca

SEQ ID NO: 2391 - DNA, 50 bp, Artificial Sequence
  Description of Artificial Sequence: Synthetic probe
atctattctccccacaatactcaacaattctactaatataactcaaatca

SEQ ID NO: 2392 - DNA, 50 bp, Artificial Sequence
  Description of Artificial Sequence: Synthetic probe
aactctaaaacaataaaaaaacctaacaaaaaattcttaacatacattca

SEQ ID NO: 2393 - DNA, 50 bp, Artificial Sequence
  Description of Artificial Sequence: Synthetic probe
ataaaaaaaccattaatttttaacaatcccacaaaatatattaaatacca

SEQ ID NO: 2394 - DNA, 50 bp, Artificial Sequence
  Description of Artificial Sequence: Synthetic probe
aatcctacttctttatattaaaatatcctaaactcacacaaaaaaactca

SEQ ID NO: 2395 - DNA, 50 bp, Artificial Sequence
  Description of Artificial Sequence: Synthetic probe
tccataactctaaattattacatttaaaattatcttcattccataaccca

SEQ ID NO: 2396 - DNA, 50 bp, Artificial Sequence
  Description of Artificial Sequence: Synthetic probe
taattttacctacttcatatataaatatatccaaacaacattacaattca

SEQ ID NO: 2397 - DNA, 50 bp, Artificial Sequence
  Description of Artificial Sequence: Synthetic probe
gagttatggatttatagtttgggaaagtaaatttagaagttttgtgattt

SEQ ID NO: 2398 - DNA, 50 bp, Artificial Sequence
  Description of Artificial Sequence: Synthetic probe
aatcataaatccacaatctaaaaaaataaacttaaaaactttataactca

SEQ ID NO: 2399 - DNA, 50 bp, Artificial Sequence
  Description of Artificial Sequence: Synthetic probe
cattaaataccaaatttttaaaaaaaccaatcaacttcaccacaatccca

SEQ ID NO: 2400 - DNA, 50 bp, Artificial Sequence
  Description of Artificial Sequence: Synthetic probe
ctaaatacaaataattacaccaaaactataataccaaaatcataatacca

SEQ ID NO: 2401 - DNA, 50 bp, Artificial Sequence
  Description of Artificial Sequence: Synthetic probe
aaaaaaatctaaatacaaataattacaccaaaactataataccaaaatca

SEQ ID NO: 2402 - DNA, 50 bp, Artificial Sequence
  Description of Artificial Sequence: Synthetic probe
catttaaaaaaaatctaaatacaaataattacaccaaaactataatacca

SEQ ID NO: 2403 - DNA, 50 bp, Artificial Sequence
  Description of Artificial Sequence: Synthetic probe
cacaaattaatcaaaacaaaaacaaaactcaatattcaaaactaacaaca

SEQ ID NO: 2404 - DNA, 50 bp, Artificial Sequence
  Description of Artificial Sequence: Synthetic probe
tcacaaccatacttcctctaaataatataaaaaccataacctcaccccca

SEQ ID NO: 2405 - DNA, 50 bp, Artificial Sequence
  Description of Artificial Sequence: Synthetic probe
acaaaaacaaaaccataattctcacaccatccaaaaaaaacataactaca

SEQ ID NO: 2406 - DNA, 50 bp, Artificial Sequence
  Description of Artificial Sequence: Synthetic probe
aaaacaaaaccataattctcacaccatccaaaaaaaacataactacaaca

SEQ ID NO: 2407 - DNA, 50 bp, Artificial Sequence
  Description of Artificial Sequence: Synthetic probe
aaaaatacaaatcctcattcaaaacaatataatccttaccatcataaaca

SEQ ID NO: 2408 - DNA, 50 bp, Artificial Sequence
  Description of Artificial Sequence: Synthetic probe
cctcctccacaaatataaacaattcacctacaataacaaaaattacatca

SEQ ID NO: 2409 - DNA, 50 bp, Artificial Sequence
  Description of Artificial Sequence: Synthetic probe
aaaccactatattcacaacaatccaaaaatacaaatcctcattcaaaaca

SEQ ID NO: 2410 - DNA, 50 bp, Artificial Sequence
  Description of Artificial Sequence: Synthetic probe
caaatataaacaattcacctacaataacaaaaattacatcaccctaaaca

SEQ ID NO: 2411 - DNA, 50 bp, Artificial Sequence
  Description of Artificial Sequence: Synthetic probe
aaaaaatctaaaccactatattcacaacaatccaaaaatacaaatcctca

SEQ ID NO: 2412 - DNA, 50 bp, Artificial Sequence
  Description of Artificial Sequence: Synthetic probe
caataacaaaaattacatcaccctaaacaaaaacctacactcctaaacca

SEQ ID NO: 2413 - DNA, 50 bp, Artificial Sequence
  Description of Artificial Sequence: Synthetic probe
tatccacttcccacttatactaaaaaatctaaaccactatattcacaaca

SEQ ID NO: 2414 - DNA, 50 bp, Artificial Sequence
  Description of Artificial Sequence: Synthetic probe
ccatacacttaccctcaaataaaccctaacctactctaaatatttatcca

SEQ ID NO: 2415 - DNA, 50 bp, Artificial Sequence
  Description of Artificial Sequence: Synthetic probe
ctcaaaacaaatcaaaacctacctaaaaacaaatacataaaataactcca

SEQ ID NO: 2416 - DNA, 50 bp, Artificial Sequence
  Description of Artificial Sequence: Synthetic probe
cctacctaaaaacaaatacataaaataactccacaaacacctaaaaaaca

SEQ ID NO: 2417 - DNA, 50 bp, Artificial Sequence
  Description of Artificial Sequence: Synthetic probe
caaaatctaaaaacccaaaattcttcccattcaaaaccaataaaaaaaca

SEQ ID NO: 2418 - DNA, 50 bp, Artificial Sequence
  Description of Artificial Sequence: Synthetic probe
tgaagtttttgaggaaatggaggagaagatagtttttggaatattgattt

SEQ ID NO: 2419 - DNA, 50 bp, Artificial Sequence
  Description of Artificial Sequence: Synthetic probe
taacctaaataaaaaccaaaacactcaaaaaaactaaaatcaaaaccaca

SEQ ID NO: 2420 - DNA, 50 bp, Artificial Sequence
  Description of Artificial Sequence: Synthetic probe
aaaaattttcctctcaaaccttattctctccctcacactcaatatatcca

SEQ ID NO: 2421 - DNA, 50 bp, Artificial Sequence
  Description of Artificial Sequence: Synthetic probe
tctaatcctaacctaaataaaaaccaaaacactcaaaaaaactaaaatca

SEQ ID NO: 2422 - DNA, 50 bp, Artificial Sequence
  Description of Artificial Sequence: Synthetic probe
caacctaaacacaaaaatctaaaataatctcctattccttaaaaaattca

SEQ ID NO: 2423 - DNA, 50 bp, Artificial Sequence
  Description of Artificial Sequence: Synthetic probe
aaaccaaacccaaaacacaaaacttataaaaaccaaacctacaaaaaaca

SEQ ID NO: 2424 - DNA, 50 bp, Artificial Sequence
  Description of Artificial Sequence: Synthetic probe
tacaaaaaacaaaaccttccaaaaataaataactataataataccttcca

SEQ ID NO: 2425 - DNA, 50 bp, Artificial Sequence
  Description of Artificial Sequence: Synthetic probe
aaacaaaccaacaacaatacccacaataaaaataataaactaaaaaaaca

SEQ ID NO: 2426 - DNA, 50 bp, Artificial Sequence
  Description of Artificial Sequence: Synthetic probe
gttttagtgattatagttttaaggagaaataggttagtaatgatgtttat

SEQ ID NO: 2427 - DNA, 50 bp, Artificial Sequence
  Description of Artificial Sequence: Synthetic probe
acctatttctccttaaaactataatcactaaaactataattactactaca

SEQ ID NO: 2428 - DNA, 50 bp, Artificial Sequence
  Description of Artificial Sequence: Synthetic probe
acaaatattaacacacaaaaccccaaactaaatcaacctatatatcaaca

SEQ ID NO: 2429 - DNA, 50 bp, Artificial Sequence
  Description of Artificial Sequence: Synthetic probe
gttttaagttataggtagaattgtgatttgttttattattgggaagtatt

SEQ ID NO: 2430 - DNA, 50 bp, Artificial Sequence
  Description of Artificial Sequence: Synthetic probe
tttcaaaccacaaataaaattataacttacttcatcactaaaaaacacca

SEQ ID NO: 2431 - DNA, 50 bp, Artificial Sequence
  Description of Artificial Sequence: Synthetic probe
aaaacaaatattaacacacaaaaccccaaactaaatcaacctatatatca

SEQ ID NO: 2432 - DNA, 50 bp, Artificial Sequence
  Description of Artificial Sequence: Synthetic probe
ttaagttataggtagaattgtgatttgttttattattgggaagtattgtt

SEQ ID NO: 2433 - DNA, 50 bp, Artificial Sequence
  Description of Artificial Sequence: Synthetic probe
caaaccacaaataaaattataacttacttcatcactaaaaaacaccatca

SEQ ID NO: 2434 - DNA, 50 bp, Artificial Sequence
  Description of Artificial Sequence: Synthetic probe
atacttcacaaaaaaacaaatattaacacacaaaaccccaaactaaatca

SEQ ID NO: 2435 - DNA, 50 bp, Artificial Sequence
  Description of Artificial Sequence: Synthetic probe
tagaattgtgatttgttttattattgggaagtattgttgatatataggtt

SEQ ID NO: 2436 - DNA, 50 bp, Artificial Sequence
  Description of Artificial Sequence: Synthetic probe
ctaaaaaatccccatcaccacaatcatcaaaataataaatttatccttca

SEQ ID NO: 2437 - DNA, 50 bp, Artificial Sequence
  Description of Artificial Sequence: Synthetic probe
ctcaaactacctattaatataaaaaattaaaaaactactccctaaaatca

SEQ ID NO: 2438 - DNA, 50 bp, Artificial Sequence
  Description of Artificial Sequence: Synthetic probe
atttcctcacattatactaactaaaacacaaacacataaatatattcaca

SEQ ID NO: 2439 - DNA, 50 bp, Artificial Sequence
  Description of Artificial Sequence: Synthetic probe
caccattataatttcaaaaactcctaacttctatatctacacttaacaca

SEQ ID NO: 2440 - DNA, 50 bp, Artificial Sequence
  Description of Artificial Sequence: Synthetic probe
cataaataaaaatatcccaacctcacctctattaaaaaaaaacttaacca

SEQ ID NO: 2441 - DNA, 50 bp, Artificial Sequence
  Description of Artificial Sequence: Synthetic probe
aaaaaactaaatataaacaacctatactcaattcatcataaaatttaaca

SEQ ID NO: 2442 - DNA, 50 bp, Artificial Sequence
  Description of Artificial Sequence: Synthetic probe
aaacacaaacaataaaacaataaaaataaccaacccaataaataaccaca

SEQ ID NO: 2443 - DNA, 50 bp, Artificial Sequence
  Description of Artificial Sequence: Synthetic probe
tgaggagttgagtgtggatagtttatgtttagtttattatggaatttgat

SEQ ID NO: 2444 - DNA, 50 bp, Artificial Sequence
  Description of Artificial Sequence: Synthetic probe
ttagggttagattatagattgatttagtttatgaagtttttgttgtttat

SEQ ID NO: 2445 - DNA, 50 bp, Artificial Sequence
  Description of Artificial Sequence: Synthetic probe
tttctttatttctataaaaaactatacctattcctattctaatatctaca

SEQ ID NO: 2446 - DNA, 50 bp, Artificial Sequence
  Description of Artificial Sequence: Synthetic probe
acccctacacacaaaaatctataatattaaaaaataaattttcaaaccca

SEQ ID NO: 2447 - DNA, 50 bp, Artificial Sequence
  Description of Artificial Sequence: Synthetic probe
ccccaaatacaaaaacattctatcatatatctaacaaacaacaaatatca

SEQ ID NO: 2448 - DNA, 50 bp, Artificial Sequence
  Description of Artificial Sequence: Synthetic probe
gatattgtttttagaataggaggtgttttatagtgatgatttatttagtt

SEQ ID NO: 2449 - DNA, 50 bp, Artificial Sequence
  Description of Artificial Sequence: Synthetic probe
atactacctttaaaataaaaaatactctacaataataattcattcaacca

SEQ ID NO: 2450 - DNA, 50 bp, Artificial Sequence
  Description of Artificial Sequence: Synthetic probe
tatcaatataccaaaacaaaatcatatctatatattctaaaaaaaacaca

SEQ ID NO: 2451 - DNA, 50 bp, Artificial Sequence
  Description of Artificial Sequence: Synthetic probe
tataccaaaacaaaatcatatctatatattctaaaaaaaacacaaaatca

SEQ ID NO: 2452 - DNA, 50 bp, Artificial Sequence
  Description of Artificial Sequence: Synthetic probe
tttaaaaaaatcactataactactctactaaaaacaaaatccaaaaacca

SEQ ID NO: 2453 - DNA, 50 bp, Artificial Sequence
  Description of Artificial Sequence: Synthetic probe
taaaatactacactcatttcctacaattttcccacctaccttactcatca

SEQ ID NO: 2454 - DNA, 50 bp, Artificial Sequence
  Description of Artificial Sequence: Synthetic probe
taaaaggattattgtagttgttttgttgagaatagaatttaaaggttggt

SEQ ID NO: 2455 - DNA, 50 bp, Artificial Sequence
  Description of Artificial Sequence: Synthetic probe
aaaaaaatcactataactactctactaaaaacaaaatccaaaaaccaaca

SEQ ID NO: 2456 - DNA, 50 bp, Artificial Sequence
  Description of Artificial Sequence: Synthetic probe
tcctttactcttctttctcataccccaaatttaatccattaaaaaataca

SEQ ID NO: 2457 - DNA, 50 bp, Artificial Sequence
  Description of Artificial Sequence: Synthetic probe
aaaaaacatcacaaacaatcactataaaaaacataaaatctaaaatacca

SEQ ID NO: 2458 - DNA, 50 bp, Artificial Sequence
  Description of Artificial Sequence: Synthetic probe
aaaaaacataaaatctaaaataccactaaaaaataccaataaaataatca

SEQ ID NO: 2459 - DNA, 50 bp, Artificial Sequence
  Description of Artificial Sequence: Synthetic probe
atctatttctcctaaatatctccaaattcatctatccaactaccaaccca

SEQ ID NO: 2460 - DNA, 50 bp, Artificial Sequence
  Description of Artificial Sequence: Synthetic probe
aaacaaaaatcacctaaacatcaccttaaatctaaactaatctaaaatca

SEQ ID NO: 2461 - DNA, 50 bp, Artificial Sequence
  Description of Artificial Sequence: Synthetic probe
tctatattcttactaccaaaaataaaatctaaaaaccaacaacatcaaca

SEQ ID NO: 2462 - DNA, 50 bp, Artificial Sequence
  Description of Artificial Sequence: Synthetic probe
gtttgtgtttttgttattaaaagtgggatttgaagattagtagtattagt

SEQ ID NO: 2463 - DNA, 50 bp, Artificial Sequence
  Description of Artificial Sequence: Synthetic probe
tttaataacaaaaacacaaaccaaaattcctaaactatacatcaacctca

SEQ ID NO: 2464 - DNA, 50 bp, Artificial Sequence
  Description of Artificial Sequence: Synthetic probe
aatattacacataaaatacaaaaattacttattaacaaacctcacaaaca

SEQ ID NO: 2465 - DNA, 50 bp, Artificial Sequence
  Description of Artificial Sequence: Synthetic probe
tataaaatactcaaacctctccacaaatacccctatatcaaaatattaca

SEQ ID NO: 2466 - DNA, 50 bp, Artificial Sequence
  Description of Artificial Sequence: Synthetic probe
tcaacctcacctataaaacttattaataaacaattcctacactccataca

SEQ ID NO: 2467 - DNA, 50 bp, Artificial Sequence
  Description of Artificial Sequence: Synthetic probe
ctctttttcttcccaatattaaatatatctttatcaacaatataaaaaca

SEQ ID NO: 2468 - DNA, 50 bp, Artificial Sequence
  Description of Artificial Sequence: Synthetic probe
aaatccaattaaacctctttttcttcccaatattaaatatatctttatca

SEQ ID NO: 2469 - DNA, 50 bp, Artificial Sequence
  Description of Artificial Sequence: Synthetic probe
tattttggggaagggtattgtattagtttatagtttgtttttatattgtt

SEQ ID NO: 2470 - DNA, 50 bp, Artificial Sequence
  Description of Artificial Sequence: Synthetic probe
tacttcttcctcattttctcttaccaccaccatataaaaaatacctttca

SEQ ID NO: 2471 - DNA, 50 bp, Artificial Sequence
  Description of Artificial Sequence: Synthetic probe
acttacaattccatttaactaaaaaaacctcaaaatcataataaaaaaca

SEQ ID NO: 2472 - DNA, 50 bp, Artificial Sequence
  Description of Artificial Sequence: Synthetic probe
attctcaaaaacaacaataataacaatctttaccacaaaacccaatatca

SEQ ID NO: 2473 - DNA, 50 bp, Artificial Sequence
  Description of Artificial Sequence: Synthetic probe
agtttttaggagtagtagtgatagtagtttttgttatagggtttagtgtt

SEQ ID NO: 2474 - DNA, 50 bp, Artificial Sequence
  Description of Artificial Sequence: Synthetic probe
ttattttaaaatccaacttttatctaccccaattttcacacacaaataca

SEQ ID NO: 2475 - DNA, 50 bp, Artificial Sequence
  Description of Artificial Sequence: Synthetic probe
aaaaaaaactttcaaataaacattttaccatcacacaatacttctccaca

SEQ ID NO: 2476 - DNA, 50 bp, Artificial Sequence
  Description of Artificial Sequence: Synthetic probe
tatataaaatatcaatatatacataaatcctctaatatcttacaaataca

SEQ ID NO: 2477 - DNA, 50 bp, Artificial Sequence
  Description of Artificial Sequence: Synthetic probe
cttaaaaacctttttccctatctttatctcttactaaaattaaaaaccca

SEQ ID NO: 2478 - DNA, 50 bp, Artificial Sequence
  Description of Artificial Sequence: Synthetic probe
tttaaaaataacattaatctaaatatacttatattccaacatctacctca

SEQ ID NO: 2479 - DNA, 50 bp, Artificial Sequence
  Description of Artificial Sequence: Synthetic probe
ataaaatccccattcactactaattaattcctaccattaatctaacacca

SEQ ID NO: 2480 - DNA, 50 bp, Artificial Sequence
  Description of Artificial Sequence: Synthetic probe
tccaacatctacctcaatatcaaattaataacaaaaattaatcaataaca

SEQ ID NO: 2481 - DNA, 50 bp, Artificial Sequence
  Description of Artificial Sequence: Synthetic probe
tcaaattaataacaaaaattaatcaataacaaataaaaattccatttcca

SEQ ID NO: 2482 - DNA, 50 bp, Artificial Sequence
  Description of Artificial Sequence: Synthetic probe
aaacaattattaatcaaaatcatactttaaaattattttaacccaaaaca

SEQ ID NO: 2483 - DNA, 50 bp, Artificial Sequence
  Description of Artificial Sequence: Synthetic probe
tacattcctataaaaatttttatttccttcttccaatttttaaatcatca

SEQ ID NO: 2484 - DNA, 50 bp, Artificial Sequence
  Description of Artificial Sequence: Synthetic probe
taaaccaccatacccaactcataattattttaaatataatactaattaca

SEQ ID NO: 2485 - DNA, 50 bp, Artificial Sequence
  Description of Artificial Sequence: Synthetic probe
ttatttccaaccctatatatcactaaatactattctctaaaatcctttca

SEQ ID NO: 2486 - DNA, 50 bp, Artificial Sequence
  Description of Artificial Sequence: Synthetic probe
tacctaaaactaacataaatatcaaaattaacaaacaataacataaaaca

SEQ ID NO: 2487 - DNA, 50 bp, Artificial Sequence
  Description of Artificial Sequence: Synthetic probe
catatctctatataactttttaaacatataaaatacatttacaataacca

SEQ ID NO: 2488 - DNA, 50 bp, Artificial Sequence
  Description of Artificial Sequence: Synthetic probe
taaatagtgattttgaagatatagaaatagaaattttttgggttaggtgt

SEQ ID NO: 2489 - DNA, 50 bp, Artificial Sequence
  Description of Artificial Sequence: Synthetic probe
aaacatcattatcttattcctaatcttacaaaaaaaatatacaactttca

SEQ ID NO: 2490 - DNA, 50 bp, Artificial Sequence
  Description of Artificial Sequence: Synthetic probe
ccaaaataaaaactataacaaactcacaactaacatcatactcaataaca

SEQ ID NO: 2491 - DNA, 50 bp, Artificial Sequence
  Description of Artificial Sequence: Synthetic probe
taggggttatattaaatttgttgattgttttgggtagtatggatattttt

SEQ ID NO: 2492 - DNA, 50 bp, Artificial Sequence
  Description of Artificial Sequence: Synthetic probe
tcttattaaaaattactttaactattacaattcttttataattccataca

SEQ ID NO: 2493 - DNA, 50 bp, Artificial Sequence
  Description of Artificial Sequence: Synthetic probe
atcaaaattccaataaaatttttaactaaattaaacaatctcaaaaatca

SEQ ID NO: 2494 - DNA, 50 bp, Artificial Sequence
  Description of Artificial Sequence: Synthetic probe
ctccaaattttataatttcaaatcttacatttacatctttaatctattca

SEQ ID NO: 2495 - DNA, 50 bp, Artificial Sequence
  Description of Artificial Sequence: Synthetic probe
aaaaaataaaactacatcccaatcttacaccatatacaaaatcaactcca

SEQ ID NO: 2496 - DNA, 50 bp, Artificial Sequence
  Description of Artificial Sequence: Synthetic probe
atttttaaaataatacccccaaaaaaatcattaccaaaaccaatatctca

SEQ ID NO: 2497 - DNA, 50 bp, Artificial Sequence
  Description of Artificial Sequence: Synthetic probe
gtaagatttgaaattataaaatttggagaagaaagtaggtgaaaagtttt

SEQ ID NO: 2498 - DNA, 50 bp, Artificial Sequence
  Description of Artificial Sequence: Synthetic probe
cttaataacaaaaaacaaataacccaattcaaatataaacaaaaaaccca

SEQ ID NO: 2499 - DNA, 50 bp, Artificial Sequence
  Description of Artificial Sequence: Synthetic probe
ttattacaaataacaatatttccttccttttcatatctaaataatattca

SEQ ID NO: 2500 - DNA, 50 bp, Artificial Sequence
  Description of Artificial Sequence: Synthetic probe
aaaataacacttcattacaattttaatttacatttttctaattaattaca

SEQ ID NO: 2501 - DNA, 50 bp, Artificial Sequence
  Description of Artificial Sequence: Synthetic probe
ccaaaaaaaacatacaaataaccaacaaatatataaaataatactaaaca

SEQ ID NO: 2502 - DNA, 50 bp, Artificial Sequence
  Description of Artificial Sequence: Synthetic probe
tctcaccattaaccaataccttaatcttaaattcataacctcctaaacca

SEQ ID NO: 2503 - DNA, 50 bp, Artificial Sequence
  Description of Artificial Sequence: Synthetic probe
taatcatcaaaaaaatacaaattaaaaacacaataatatacccctacaca

SEQ ID NO: 2504 - DNA, 50 bp, Artificial Sequence
  Description of Artificial Sequence: Synthetic probe
cattacaacatttattaatactacatttctttttataaccaaatattcca

SEQ ID NO: 2505 - DNA, 50 bp, Artificial Sequence
  Description of Artificial Sequence: Synthetic probe
aatactacaatataaataaaccttaaaaacattatactatataaaaaaca

SEQ ID NO: 2506 - DNA, 50 bp, Artificial Sequence
  Description of Artificial Sequence: Synthetic probe
accttttaatctctttctccacaatctaccataacaactctaacacatca

SEQ ID NO: 2507 - DNA, 50 bp, Artificial Sequence
  Description of Artificial Sequence: Synthetic probe
acccaaaaaaaactctatttatcaaacaacaaatcataaacaaataaaca

SEQ ID NO: 2508 - DNA, 50 bp, Artificial Sequence
  Description of Artificial Sequence: Synthetic probe
tcataaaatcaactccaacccacaaaaaacaaaattaaattaatacccca

SEQ ID NO: 2509 - DNA, 50 bp, Artificial Sequence
  Description of Artificial Sequence: Synthetic probe
ggtttaaaggaaattttgtttattaggtagtaagttatgggtaggtgaat

SEQ ID NO: 2510 - DNA, 50 bp, Artificial Sequence
  Description of Artificial Sequence: Synthetic probe
acctaaaccaatacttaaatccaaaatccattcattaaaaaaaaatcaca

SEQ ID NO: 2511 - DNA, 50 bp, Artificial Sequence
  Description of Artificial Sequence: Synthetic probe
aagtgtttattgtatatatttatggtgttgtagatattttattaggggat

SEQ ID NO: 2512 - DNA, 50 bp, Artificial Sequence
  Description of Artificial Sequence: Synthetic probe
aatatctactatacacacttataatattacaaatacttcatcaaaaaaca

SEQ ID NO: 2513 - DNA, 50 bp, Artificial Sequence
  Description of Artificial Sequence: Synthetic probe
gatttgagttagtgtttagatttagaatttatttattgaaggagagttat

SEQ ID NO: 2514 - DNA, 50 bp, Artificial Sequence
  Description of Artificial Sequence: Synthetic probe
acacaaaaaactaaaaataatttcctatctcaaatccacccatatctcca

SEQ ID NO: 2515 - DNA, 50 bp, Artificial Sequence
  Description of Artificial Sequence: Synthetic probe
tttcattacccctcaaatactacattattttaaaatttctatcttaatca

SEQ ID NO: 2516 - DNA, 50 bp, Artificial Sequence
  Description of Artificial Sequence: Synthetic probe
ttactcaaactaatcttaaacttctaaactcaaataatctaccctcctca

SEQ ID NO: 2517 - DNA, 50 bp, Artificial Sequence
  Description of Artificial Sequence: Synthetic probe
tacaacaatcctactactaaatatataccccacaaaaaacaaaaccaaca

SEQ ID NO: 2518 - DNA, 50 bp, Artificial Sequence
  Description of Artificial Sequence: Synthetic probe
ttatcttttataaaatatatacccaacaataaaattattacatcatatca

SEQ ID NO: 2519 - DNA, 50 bp, Artificial Sequence
  Description of Artificial Sequence: Synthetic probe
tttgttttttgtggggtatatatttagtagtaggattgttgtattatatt

SEQ ID NO: 2520 - DNA, 50 bp, Artificial Sequence
  Description of Artificial Sequence: Synthetic probe
ctattatccataataattatactaatttacattcccatcaacaatataca

SEQ ID NO: 2521 - DNA, 50 bp, Artificial Sequence
  Description of Artificial Sequence: Synthetic probe
agataggtaataataaatgttggtgaggatgtggataaaagggaattttt

SEQ ID NO: 2522 - DNA, 50 bp, Artificial Sequence
  Description of Artificial Sequence: Synthetic probe
ttcttttttttctttttcttttttttaaaacaatatctctcactctatca

SEQ ID NO: 2523 - DNA, 50 bp, Artificial Sequence
  Description of Artificial Sequence: Synthetic probe
cttaaacctacaataaatcataattacaccaatacactccaacctaaaca

SEQ ID NO: 2524 - DNA, 50 bp, Artificial Sequence
  Description of Artificial Sequence: Synthetic probe
caataatataatctcaacttactacaacctctatctcccaaatttaaaca

SEQ ID NO: 2525 - DNA, 50 bp, Artificial Sequence
  Description of Artificial Sequence: Synthetic probe
aaaataaatttcaccatattaatcaaaataatctcaatctcttcacctca

SEQ ID NO: 2526 - DNA, 50 bp, Artificial Sequence
  Description of Artificial Sequence: Synthetic probe
atttcaccatattaatcaaaataatctcaatctcttcacctcataataca

SEQ ID NO: 2527 - DNA, 50 bp, Artificial Sequence
  Description of Artificial Sequence: Synthetic probe
cttctccctttccaatttaaataacctttatatcttctcttatctaatca

SEQ ID NO: 2528 - DNA, 50 bp, Artificial Sequence
  Description of Artificial Sequence: Synthetic probe
cactatcaccactattattcaacaaaatactaaatattctaactaaaaca

SEQ ID NO: 2529 - DNA, 50 bp, Artificial Sequence
  Description of Artificial Sequence: Synthetic probe
ccccattcaatataatactaactataaatctatcatatctaactattaca

SEQ ID NO: 2530 - DNA, 50 bp, Artificial Sequence
  Description of Artificial Sequence: Synthetic probe
ttcataataaaaaccctcaaaaaactatataaaaaaaatatacctcaaca

SEQ ID NO: 2531 - DNA, 50 bp, Artificial Sequence
  Description of Artificial Sequence: Synthetic probe
aaattaaaaccataataaaaaatctcccactaaaaaaaaccaaaaaccca

SEQ ID NO: 2532 - DNA, 50 bp, Artificial Sequence
  Description of Artificial Sequence: Synthetic probe
catataaacacttataactatcaatttacctcttaatactacttttacca

SEQ ID NO: 2533 - DNA, 50 bp, Artificial Sequence
  Description of Artificial Sequence: Synthetic probe
aatatatatacactcaacactacaacacccaaatatataaaacaaataca

SEQ ID NO: 2534 - DNA, 50 bp, Artificial Sequence
  Description of Artificial Sequence: Synthetic probe
tctccaactattattatattaaaatcactctctctctttaactctaatca

SEQ ID NO: 2535 - DNA, 50 bp, Artificial Sequence
  Description of Artificial Sequence: Synthetic probe
aattaaaccctatattaatctattcttacactactataaaaaaataccca

SEQ ID NO: 2536 - DNA, 50 bp, Artificial Sequence
  Description of Artificial Sequence: Synthetic probe
caacttacactatacaactaaaaaaaccacaaacaatcaataccaaccca

SEQ ID NO: 2537 - DNA, 50 bp, Artificial Sequence
  Description of Artificial Sequence: Synthetic probe
tagtttagtttttgggattttgtagggtaagttattgttattgtttttat

SEQ ID NO: 2538 - DNA, 50 bp, Artificial Sequence
  Description of Artificial Sequence: Synthetic probe
ctcaaactactactccataaaatacaaattataaaccttaataactccca

SEQ ID NO: 2539 - DNA, 50 bp, Artificial Sequence
  Description of Artificial Sequence: Synthetic probe
atctttactcacaaatataaacacaaactaccaaaaacaaccaaaccaca

SEQ ID NO: 2540 - DNA, 50 bp, Artificial Sequence
  Description of Artificial Sequence: Synthetic probe
cacaaatataaacacaaactaccaaaaacaaccaaaccacatcttaaaca

SEQ ID NO: 2541 - DNA, 50 bp, Artificial Sequence
  Description of Artificial Sequence: Synthetic probe
aaacactttactacttaaaaatttcttctaccaaataccctaaatcttca

SEQ ID NO: 2542 - DNA, 50 bp, Artificial Sequence
  Description of Artificial Sequence: Synthetic probe
aacattatacccctaccctaaaaatctataaaactttaaacttaaaaaca

SEQ ID NO: 2543 - DNA, 50 bp, Artificial Sequence
  Description of Artificial Sequence: Synthetic probe
ttaacaaatctctaaaaaattccaaacttcccctcatcttcctatcttca

SEQ ID NO: 2544 - DNA, 50 bp, Artificial Sequence
  Description of Artificial Sequence: Synthetic probe
aaaaaattaaattaactcataattccacaaactattcaaaaaacataaca

SEQ ID NO: 2545 - DNA, 50 bp, Artificial Sequence
  Description of Artificial Sequence: Synthetic probe
attattccataaataaaaactccctcaaaccttcccaaaatcaaatacca

SEQ ID NO: 2546 - DNA, 50 bp, Artificial Sequence
  Description of Artificial Sequence: Synthetic probe
aaagaggttgaattggtttatagttttataggttgtttaggaagtatagt

SEQ ID NO: 2547 - DNA, 50 bp, Artificial Sequence
  Description of Artificial Sequence: Synthetic probe
tacaaaataaaaacaaacatctacataacaaaaataaaccaaaacaaaca

SEQ ID NO: 2548 - DNA, 50 bp, Artificial Sequence
  Description of Artificial Sequence: Synthetic probe
ttctaaaatctaattacttaaaaatatataacacctctccacaccaccca

SEQ ID NO: 2549 - DNA, 50 bp, Artificial Sequence
  Description of Artificial Sequence: Synthetic probe
atgtaaagtgggagtaagtatttatatagtaggagtagattaaggtaagt

SEQ ID NO: 2550 - DNA, 50 bp, Artificial Sequence
  Description of Artificial Sequence: Synthetic probe
aaataatactaaattaatcataaaaaatccacccccataatctaatcaca

SEQ ID NO: 2551 - DNA, 50 bp, Artificial Sequence
  Description of Artificial Sequence: Synthetic probe
ttcatattctattataatcctcaatattaaaaataaaacctaataaaaca

SEQ ID NO: 2552 - DNA, 50 bp, Artificial Sequence
  Description of Artificial Sequence: Synthetic probe
aataataaaaaaattaatataatttccatttataccccacccaaatttca

SEQ ID NO: 2553 - DNA, 50 bp, Artificial Sequence
  Description of Artificial Sequence: Synthetic probe
aacaaaaactaaaaaatttcatcaacactaaactaatcccataaaaaaca

SEQ ID NO: 2554 - DNA, 50 bp, Artificial Sequence
  Description of Artificial Sequence: Synthetic probe
tattactcattaatatctatttctttctaaccaaaatactcccttaaaca

SEQ ID NO: 2555 - DNA, 50 bp, Artificial Sequence
  Description of Artificial Sequence: Synthetic probe
ctctccatattaatcaaactaatctcaaactaccaacctcaaataatcca

SEQ ID NO: 2556 - DNA, 50 bp, Artificial Sequence
  Description of Artificial Sequence: Synthetic probe
ttacaacactattaacaataacaaaactaaacacaataactcacctcaca

SEQ ID NO: 2557 - DNA, 50 bp, Artificial Sequence
  Description of Artificial Sequence: Synthetic probe
attttacatttctctaataatcaataataattaaaattttctttaacaca

SEQ ID NO: 2558 - DNA, 50 bp, Artificial Sequence
  Description of Artificial Sequence: Synthetic probe
aaacataaacaaacacttttcaaaaaaaacatacatacaaccaactaaca

SEQ ID NO: 2559 - DNA, 50 bp, Artificial Sequence
  Description of Artificial Sequence: Synthetic probe
ctctttaaaccatcttaatttttatacataataaaaaaaatccaattaca

SEQ ID NO: 2560 - DNA, 50 bp, Artificial Sequence
  Description of Artificial Sequence: Synthetic probe
ttatttaataaatggtgttgggataattggttggttatatgtagaagatt

SEQ ID NO: 2561 - DNA, 50 bp, Artificial Sequence
  Description of Artificial Sequence: Synthetic probe
taaaaaatttttccatttatttatatcatctctaatttctttaaacaaca

SEQ ID NO: 2562 - DNA, 50 bp, Artificial Sequence
  Description of Artificial Sequence: Synthetic probe
aaaaaacaaaatcaatatacaaaaatcactaacattcctatacacaatca

SEQ ID NO: 2563 - DNA, 50 bp, Artificial Sequence
  Description of Artificial Sequence: Synthetic probe
ataacaattataaataaaattatactcctaatttaactcttaacttaaca

SEQ ID NO: 2564 - DNA, 50 bp, Artificial Sequence
  Description of Artificial Sequence: Synthetic probe
actaccattacaactacctatacttaaacataaaccctctacaatataca

SEQ ID NO: 2565 - DNA, 50 bp, Artificial Sequence
  Description of Artificial Sequence: Synthetic probe
aataaaaaaactaacaaaaaccacaaatactaataatataactactacca

SEQ ID NO: 2566 - DNA, 50 bp, Artificial Sequence
  Description of Artificial Sequence: Synthetic probe
aattgttgtatattgtagagggtttatgtttaagtataggtagttgtaat

SEQ ID NO: 2567 - DNA, 50 bp, Artificial Sequence
  Description of Artificial Sequence: Synthetic probe
aaacaaaatcacaatacacaacattaacataaaaaaatacattatacaca

SEQ ID NO: 2568 - DNA, 50 bp, Artificial Sequence
  Description of Artificial Sequence: Synthetic probe
tattaatattaaaatttacattctctaaaacctcaaaaaaaactatacca

SEQ ID NO: 2569 - DNA, 50 bp, Artificial Sequence
  Description of Artificial Sequence: Synthetic probe
tataaataaactataaaattattctacctaaaataaccacaccctcctca

SEQ ID NO: 2570 - DNA, 50 bp, Artificial Sequence
  Description of Artificial Sequence: Synthetic probe
catataactattaaataaaaaatttaaacctataaactataaaaccccca

SEQ ID NO: 2571 - DNA, 50 bp, Artificial Sequence
  Description of Artificial Sequence: Synthetic probe
tatctctcccaataaacaataaacccctaaaaaacaaaaactatataaca

SEQ ID NO: 2572 - DNA, 50 bp, Artificial Sequence
  Description of Artificial Sequence: Synthetic probe
caaactaatcctaataaaaacaactattcaacaaaattaccaaatcacca

SEQ ID NO: 2573 - DNA, 50 bp, Artificial Sequence
  Description of Artificial Sequence: Synthetic probe
atggtgatttggtaattttgttgaatagttgtttttattaggattagttt

SEQ ID NO: 2574 - DNA, 50 bp, Artificial Sequence
  Description of Artificial Sequence: Synthetic probe
acttaaaaaatctcattttcttcatctactcaaatcatacacatccctca

SEQ ID NO: 2575 - DNA, 50 bp, Artificial Sequence
  Description of Artificial Sequence: Synthetic probe
tatttcttctacatctcatttaacatttaaaaaaaaactattctctaaca

SEQ ID NO: 2576 - DNA, 50 bp, Artificial Sequence
  Description of Artificial Sequence: Synthetic probe
tttataggtttggaaatattttattgattttgtgaggtatattaggagat

SEQ ID NO: 2577 - DNA, 50 bp, Artificial Sequence
  Description of Artificial Sequence: Synthetic probe
ctataaatctaaaaacactttactaactctataaaacataccaaaaaaca

SEQ ID NO: 2578 - DNA, 50 bp, Artificial Sequence
  Description of Artificial Sequence: Synthetic probe
acacacaaaaaaactaaccctaataaccaacctaaaccaattcactcaca

SEQ ID NO: 2579 - DNA, 50 bp, Artificial Sequence
  Description of Artificial Sequence: Synthetic probe
cctaccaatctaacctaaaaattatatacttaccaacccccacaatcaca

SEQ ID NO: 2580 - DNA, 50 bp, Artificial Sequence
  Description of Artificial Sequence: Synthetic probe
gatatatagagaaattgattttggtgattagtttgggttagtttatttat

SEQ ID NO: 2581 - DNA, 50 bp, Artificial Sequence
  Description of Artificial Sequence: Synthetic probe
tttaaaccccaaaattttacaaaattttaataaaacctaaactttcttca

SEQ ID NO: 2582 - DNA, 50 bp, Artificial Sequence
  Description of Artificial Sequence: Synthetic probe
ttaatgtgagatagttgtatgatggtatagatagtgttagtatatgtaat

SEQ ID NO: 2583 - DNA, 50 bp, Artificial Sequence
  Description of Artificial Sequence: Synthetic probe
atataaaacaatcaatataacttctacaataaacaaatttttaaacccca

SEQ ID NO: 2584 - DNA, 50 bp, Artificial Sequence
  Description of Artificial Sequence: Synthetic probe
taccaacttcataattacccatataaacaaatcaacaaaatcaaaacaca

SEQ ID NO: 2585 - DNA, 50 bp, Artificial Sequence
  Description of Artificial Sequence: Synthetic probe
actcttcctcatatcctaatcctactaacttatccacataaacaactaca

SEQ ID NO: 2586 - DNA, 50 bp, Artificial Sequence
  Description of Artificial Sequence: Synthetic probe
ataaatggtggtgattaaagtgaataaagaagtatagttgtgttagtttt

SEQ ID NO: 2587 - DNA, 50 bp, Artificial Sequence
  Description of Artificial Sequence: Synthetic probe
accaccatttattctactattaaactacccatatataaacaaatttcaca

SEQ ID NO: 2588 - DNA, 50 bp, Artificial Sequence
  Description of Artificial Sequence: Synthetic probe
cttactaaaaaattaactcaaaattcccaaacactaaacaaaaacaatca

SEQ ID NO: 2589 - DNA, 50 bp, Artificial Sequence
  Description of Artificial Sequence: Synthetic probe
aaaaaatttctttttcccccacaaacaatcaaaaaataattcctttccca

SEQ ID NO: 2590 - DNA, 50 bp, Artificial Sequence
  Description of Artificial Sequence: Synthetic probe
atttattgagggattgatttaagatttttaggtattagatagaagtagtt

SEQ ID NO: 2591 - DNA, 50 bp, Artificial Sequence
  Description of Artificial Sequence: Synthetic probe
aaaaccacaaaacaacccctctataaaaatacataataccccatctacca

SEQ ID NO: 2592 - DNA, 50 bp, Artificial Sequence
  Description of Artificial Sequence: Synthetic probe
atggattttaatatagtaaaaagtgaaggtagtgtattttttagaagggt

SEQ ID NO: 2593 - DNA, 50 bp, Artificial Sequence
  Description of Artificial Sequence: Synthetic probe
aaaaataaaaacaatacattcttcaaaaaaacaacaaataaaacaccaca

SEQ ID NO: 2594 - DNA, 50 bp, Artificial Sequence
  Description of Artificial Sequence: Synthetic probe
acctaacaactcctacaaaaaccacaaaacaacccctctataaaaataca

SEQ ID NO: 2595 - DNA, 50 bp, Artificial Sequence
  Description of Artificial Sequence: Synthetic probe
ttcctaaaattttaaccaaaaatttaactaaataattaattttaccaaca

SEQ ID NO: 2596 - DNA, 50 bp, Artificial Sequence
  Description of Artificial Sequence: Synthetic probe
taggttaaattttttatgttgtaggagatagagaattttaggtgagattt

SEQ ID NO: 2597 - DNA, 50 bp, Artificial Sequence
  Description of Artificial Sequence: Synthetic probe
aaactaaatccttcatattacaaaaaacaaaaaatcccaaataaaaccca

SEQ ID NO: 2598 - DNA, 50 bp, Artificial Sequence
  Description of Artificial Sequence: Synthetic probe
ctacccttttccctccaaaaacaaaaccaaaataatttatcctaaacaca

SEQ ID NO: 2599 - DNA, 50 bp, Artificial Sequence
  Description of Artificial Sequence: Synthetic probe
tactataaaaaactatttcatttaacaccctactacctaaacataataca

SEQ ID NO: 2600 - DNA, 50 bp, Artificial Sequence
  Description of Artificial Sequence: Synthetic probe
tttattataaccaaaaataactttaaacattactataaaaaactatttca

SEQ ID NO: 2601 - DNA, 50 bp, Artificial Sequence
  Description of Artificial Sequence: Synthetic probe
aaaacaaaatccacaaattcactcaataaatctacacataacccttaaca

SEQ ID NO: 2602 - DNA, 50 bp, Artificial Sequence
  Description of Artificial Sequence: Synthetic probe
ataaacaaattttactatactctcctcrataaaaaaaaaccctaatttcc

SEQ ID NO: 2603 - DNA, 50 bp, Artificial Sequence
  Description of Artificial Sequence: Synthetic probe
tgagaggttaaataatgtagggtgtttgtaaatagtagtataatttatat

SEQ ID NO: 2604 - DNA, 50 bp, Artificial Sequence
  Description of Artificial Sequence: Synthetic probe
catctctttcaataaatattctccataactaatactaacracraaaaaac

SEQ ID NO: 2605 - DNA, 50 bp, Artificial Sequence
  Description of Artificial Sequence: Synthetic probe
aaaccaaaacctattctttccacttctaaaactataacttaaatttctcc

SEQ ID NO: 2606 - DNA, 50 bp, Artificial Sequence
  Description of Artificial Sequence: Synthetic probe
tttatcctacccctacttaacraaatttaccraaattatctacctatccc

SEQ ID NO: 2607 - DNA, 50 bp, Artificial Sequence
  Description of Artificial Sequence: Synthetic probe
crataaacttcaaatactctttatcctacccctacttaacraaatttacc

SEQ ID NO: 2608 - DNA, 50 bp, Artificial Sequence
  Description of Artificial Sequence: Synthetic probe
craaaacaactataattacrtacraaaaaccrataacrcaatcrcraaac

SEQ ID NO: 2609 - DNA, 50 bp, Artificial Sequence
  Description of Artificial Sequence: Synthetic probe
aaacccrcrataactacrtcaaaatttcacccraaaaaataaacaacaac

SEQ ID NO: 2610 - DNA, 50 bp, Artificial Sequence
  Description of Artificial Sequence: Synthetic probe
aactaataaattataacaaccatattaaatattactaaactcaaaccaac

SEQ ID NO: 2611 - DNA, 50 bp, Artificial Sequence
  Description of Artificial Sequence: Synthetic probe
aaaaattccaatcactacaaataaactcrttactctcttttcaaaaaatc

SEQ ID NO: 2612 - DNA, 50 bp, Artificial Sequence
  Description of Artificial Sequence: Synthetic probe
atcaaactaacctaaaaaaaatctactctcttcttaaaataacatttcac

SEQ ID NO: 2613 - DNA, 50 bp, Artificial Sequence
  Description of Artificial Sequence: Synthetic probe
ttttccctattccaacccttaacaaccactaatctatttctacctttaca

SEQ ID NO: 2614 - DNA, 50 bp, Artificial Sequence
  Description of Artificial Sequence: Synthetic probe
tattatatctaatttctttcacttaacataatattttcaaaattcatcca

SEQ ID NO: 2615 - DNA, 50 bp, Artificial Sequence
  Description of Artificial Sequence: Synthetic probe
caaatattcataacaacactattcacaataaccaaaaaacaaaaataaca

SEQ ID NO: 2616 - DNA, 50 bp, Artificial Sequence
  Description of Artificial Sequence: Synthetic probe
taaatataccacattttatttatccattcaaccatcaataaacacttcca

SEQ ID NO: 2617 - DNA, 50 bp, Artificial Sequence
  Description of Artificial Sequence: Synthetic probe
aatttaataattcctcaaaaaattaaaatataaaactatcaaacaaacca

SEQ ID NO: 2618 - DNA, 50 bp, Artificial Sequence
  Description of Artificial Sequence: Synthetic probe
tattatttattataaccatcctataataacattctaataaatataaaacc

SEQ ID NO: 2619 - DNA, 50 bp, Artificial Sequence
  Description of Artificial Sequence: Synthetic probe
attatttattataaccatcctataataacattctaataaatataaaacca

SEQ ID NO: 2620 - DNA, 50 bp, Artificial Sequence
  Description of Artificial Sequence: Synthetic probe
tactaaacccttatcaaatatataatttacaaacattttctttcattcca

SEQ ID NO: 2621 - DNA, 50 bp, Artificial Sequence
  Description of Artificial Sequence: Synthetic probe
ttaaaacattcatttcccttccataaaccattcaacaaaactcattaatc

SEQ ID NO: 2622 - DNA, 50 bp, Artificial Sequence
  Description of Artificial Sequence: Synthetic probe
taaaacattcatttcccttccataaaccattcaacaaaactcattaatca

SEQ ID NO: 2623 - DNA, 50 bp, Artificial Sequence
  Description of Artificial Sequence: Synthetic probe
aatataaatatctaaatttctcttcctaaaatcctttccttcttaaaaca

SEQ ID NO: 2624 - DNA, 50 bp, Artificial Sequence
  Description of Artificial Sequence: Synthetic probe
atttcttaaaaacccaaaaaaataacacaacaaaaaactactatacctcc

SEQ ID NO: 2625 - DNA, 50 bp, Artificial Sequence
  Description of Artificial Sequence: Synthetic probe
tattttttagggatttaaggagatggtatagtagagagttgttgtatttt

SEQ ID NO: 2626 - DNA, 50 bp, Artificial Sequence
  Description of Artificial Sequence: Synthetic probe
ttactacaaaactatcaacacttaaccacttctacttcctcaaaaaaatc

SEQ ID NO: 2627 - DNA, 50 bp, Artificial Sequence
  Description of Artificial Sequence: Synthetic probe
ttcctaaaaataacttcacataaatatttaacacacaaatctactacccc

SEQ ID NO: 2628 - DNA, 50 bp, Artificial Sequence
  Description of Artificial Sequence: Synthetic probe
cttccactacccttaaacctaaactattaaaacttatccccttaataacc

SEQ ID NO: 2629 - DNA, 50 bp, Artificial Sequence
  Description of Artificial Sequence: Synthetic probe
accaatacaaatttaaactaaacctaaaactatccctacrcaaccattac

SEQ ID NO: 2630 - DNA, 50 bp, Artificial Sequence
  Description of Artificial Sequence: Synthetic probe
actcattacaaccaaaaaaaccaaccaaataacttcaaaaaaacctcaca

SEQ ID NO: 2631 - DNA, 50 bp, Artificial Sequence
  Description of Artificial Sequence: Synthetic probe
aattacctttataatcaaaccaactaaaactcrttacaaccaaaaaaacc

SEQ ID NO: 2632 - DNA, 50 bp, Artificial Sequence
  Description of Artificial Sequence: Synthetic probe
attacctttataatcaaaccaactaaaactcattacaaccaaaaaaacca

SEQ ID NO: 2633 - DNA, 50 bp, Artificial Sequence
  Description of Artificial Sequence: Synthetic probe
tacaaaataaaaactacatacttaaaatttccaatcatcctactaacaac

SEQ ID NO: 2634 - DNA, 50 bp, Artificial Sequence
  Description of Artificial Sequence: Synthetic probe
aaaatactcccacaactaaaactctaataacttcaaaacacaaaaccttc

SEQ ID NO: 2635 - DNA, 50 bp, Artificial Sequence
  Description of Artificial Sequence: Synthetic probe
tttaatttttccaaaataaacaacatataaaccaaaaacaataactcaca

SEQ ID NO: 2636 - DNA, 50 bp, Artificial Sequence
  Description of Artificial Sequence: Synthetic probe
acctcataatctacctacctcaacctaccaaaatactacaattacaaaca

SEQ ID NO: 2637 - DNA, 50 bp, Artificial Sequence
  Description of Artificial Sequence: Synthetic probe
aaacttaatttttaatttttccaaaataaacaacatataaaccaaaaaca

SEQ ID NO: 2638 - DNA, 50 bp, Artificial Sequence
  Description of Artificial Sequence: Synthetic probe
aaaaccaaaacaaactaatcacctaaaattaaaaattcaaaaccaaccca

SEQ ID NO: 2639 - DNA, 50 bp, Artificial Sequence
  Description of Artificial Sequence: Synthetic probe
atctctacacactcttaaaaattaatcctaactaaacacaataactcaca

SEQ ID NO: 2640 - DNA, 50 bp, Artificial Sequence
  Description of Artificial Sequence: Synthetic probe
cttcctaaatactcataacrcaaactcaattctcattcccaataaatatc

SEQ ID NO: 2641 - DNA, 50 bp, Artificial Sequence
  Description of Artificial Sequence: Synthetic probe
ttcctaaatactcataacacaaactcaattctcattcccaataaatatca

SEQ ID NO: 2642 - DNA, 50 bp, Artificial Sequence
  Description of Artificial Sequence: Synthetic probe
ctttataatcaaaaatcataacaacactaattaacttctctaaaaaccca

SEQ ID NO: 2643 - DNA, 50 bp, Artificial Sequence
  Description of Artificial Sequence: Synthetic probe
aaaacacaaaacaccaaaaacaccacacaaattttccaaataaatctaca

SEQ ID NO: 2644 - DNA, 50 bp, Artificial Sequence
  Description of Artificial Sequence: Synthetic probe
attattttgtgggtattttggtttaaattgaaaaagaattgggtaaaggt

SEQ ID NO: 2645 - DNA, 50 bp, Artificial Sequence
  Description of Artificial Sequence: Synthetic probe
gttttagtttgtagttatgtatttattgtagggtgtgagattttggtttt

SEQ ID NO: 2646 - DNA, 50 bp, Artificial Sequence
  Description of Artificial Sequence: Synthetic probe
aaatacctaaattttctaactcttcccctcaaaacccccaaaaacacaca

SEQ ID NO: 2647 - DNA, 50 bp, Artificial Sequence
  Description of Artificial Sequence: Synthetic probe
atttttaggttttagttttgattttgtggaagggttttagaagggttttt

SEQ ID NO: 2648 - DNA, 50 bp, Artificial Sequence
  Description of Artificial Sequence: Synthetic probe
gttttagagattatagatttaaggagaattaggttagtaatgatgtttat

SEQ ID NO: 2649 - DNA, 50 bp, Artificial Sequence
  Description of Artificial Sequence: Synthetic probe
ctccaaaaaccacaaatccaaaaaaaaccaaaccaacaataatacccaca

SEQ ID NO: 2650 - DNA, 50 bp, Artificial Sequence
  Description of Artificial Sequence: Synthetic probe
tcacaaatactttacaaaaaaataaatacaactaaatacaataactcaca

SEQ ID NO: 2651 - DNA, 50 bp, Artificial Sequence
  Description of Artificial Sequence: Synthetic probe
aataaatctatccttcattatcacaaatactttacaaaaaaataaataca

SEQ ID NO: 2652 - DNA, 50 bp, Artificial Sequence
  Description of Artificial Sequence: Synthetic probe
ttcccctataacctataactactaaaatcaaatccccatcaccacaatca

SEQ ID NO: 2653 - DNA, 50 bp, Artificial Sequence
  Description of Artificial Sequence: Synthetic probe
tcttttataaaacacctataacaataaaaaacaaatttatcaccttaaca

SEQ ID NO: 2654 - DNA, 50 bp, Artificial Sequence
  Description of Artificial Sequence: Synthetic probe
aaaaaatttcctaaactataactacaaacccaaaacaaaatcaaaaaaca

SEQ ID NO: 2655 - DNA, 50 bp, Artificial Sequence
  Description of Artificial Sequence: Synthetic probe
caaacctcaaaaaaacaattaatccaaaacccacacctactttcttcaca

SEQ ID NO: 2656 - DNA, 50 bp, Artificial Sequence
  Description of Artificial Sequence: Synthetic probe
aatataatacaaaaaaaattataaaataaacaaactcctccacactccca

SEQ ID NO: 2657 - DNA, 50 bp, Artificial Sequence
  Description of Artificial Sequence: Synthetic probe
tattaaccaaaataatttcaatctcctaacctcataatctaccctcctca

SEQ ID NO: 2658 - DNA, 50 bp, Artificial Sequence
  Description of Artificial Sequence: Synthetic probe
tataataacccattaatccattaacccataaataaaaacacaaccttaca

SEQ ID NO: 2659 - DNA, 50 bp, Artificial Sequence
  Description of Artificial Sequence: Synthetic probe
atctaatatctaataaatccaaaccacaaaaaaaaataccttataaaaca

SEQ ID NO: 2660 - DNA, 50 bp, Artificial Sequence
  Description of Artificial Sequence: Synthetic probe
taactccacaattctaaaatcctaataataatcaaatcctactcccaaca

SEQ ID NO: 2661 - DNA, 50 bp, Artificial Sequence
  Description of Artificial Sequence: Synthetic probe
taaccaccaccaaaaccccaaaactataaaatcaataacaacatacaaca

SEQ ID NO: 2662 - DNA, 50 bp, Artificial Sequence
  Description of Artificial Sequence: Synthetic probe
actactcaaataaattacaaactaatacctaaaactttcccaaaaaaaca

SEQ ID NO: 2663 - DNA, 50 bp, Artificial Sequence
  Description of Artificial Sequence: Synthetic probe
ttgattattattaggattttagaattgtggagttagtggtagtatgtagt

SEQ ID NO: 2664 - DNA, 50 bp, Artificial Sequence
  Description of Artificial Sequence: Synthetic probe
atacaacacccccttaaaaaaactttaaacaccaacctacaacccattca

SEQ ID NO: 2665 - DNA, 50 bp, Artificial Sequence
  Description of Artificial Sequence: Synthetic probe
aataaccccatacctataactttactaaatacaacctacataactactca

SEQ ID NO: 2666 - DNA, 50 bp, Artificial Sequence
  Description of Artificial Sequence: Synthetic probe
caaaacctcaaataaccccatacctataactttactaaatacaacctaca

SEQ ID NO: 2667 - DNA, 50 bp, Artificial Sequence
  Description of Artificial Sequence: Synthetic probe
cccttaaaaaaactttaaacaccaacctacaacccattcaaacaaccaca

SEQ ID NO: 2668 - DNA, 50 bp, Artificial Sequence
  Description of Artificial Sequence: Synthetic probe
acaaacacactaaaacaaaaattaaacccccaaaacctcaaataacccca

SEQ ID NO: 2669 - DNA, 50 bp, Artificial Sequence
  Description of Artificial Sequence: Synthetic probe
taatttatttgagtagttatgtaggttgtatttagtaaagttataggtat

SEQ ID NO: 2670 - DNA, 50 bp, Artificial Sequence
  Description of Artificial Sequence: Synthetic probe
aaccttaaaaacccaatccctactccaatatatccataaaacaacacaca

SEQ ID NO: 2671 - DNA, 50 bp, Artificial Sequence
  Description of Artificial Sequence: Synthetic probe
accccatctctactaaaaacacaaaaattaactaaatataataacacaca

SEQ ID NO: 2672 - DNA, 50 bp, Artificial Sequence
  Description of Artificial Sequence: Synthetic probe
cctcactaatttcttttttcttattacccaaactaaaaaacaataacaca

SEQ ID NO: 2673 - DNA, 50 bp, Artificial Sequence
  Description of Artificial Sequence: Synthetic probe
tttttcttattacccaaactaaaaaacaataacacaatcttaactcacca

SEQ ID NO: 2674 - DNA, 50 bp, Artificial Sequence
  Description of Artificial Sequence: Synthetic probe
aaaaaccctatctctactaaaaatccaaaaaattaaccaacataataaca

SEQ ID NO: 2675 - DNA, 50 bp, Artificial Sequence
  Description of Artificial Sequence: Synthetic probe
ccatattaatcaaactaatctcaaactcccaacctcaaataatcaaccca

SEQ ID NO: 2676 - DNA, 50 bp, Artificial Sequence
  Description of Artificial Sequence: Synthetic probe
ccttaaaataaatctaaaacccaaaaattcaaaaaaacccacaccatcca

SEQ ID NO: 2677 - DNA, 50 bp, Artificial Sequence
  Description of Artificial Sequence: Synthetic probe
attccacaaccttaaaataaatctaaaacccaaaaattcaaaaaaaccca

SEQ ID NO: 2678 - DNA, 50 bp, Artificial Sequence
  Description of Artificial Sequence: Synthetic probe
atctaaacaaattccacaaccttaaaataaatctaaaacccaaaaattca

SEQ ID NO: 2679 - DNA, 50 bp, Artificial Sequence
  Description of Artificial Sequence: Synthetic probe
aaaaaccaaataaaaacacctaaaactctccccaatctaaaatctaaaca

SEQ ID NO: 2680 - DNA, 50 bp, Artificial Sequence
  Description of Artificial Sequence: Synthetic probe
aaaatctcacaccctacaataaatacataactacaaactaaaacccaaca

SEQ ID NO: 2681 - DNA, 50 bp, Artificial Sequence
  Description of Artificial Sequence: Synthetic probe
ttcaaaataaaataatccttaccatcataaacaaactattcatacccaca

SEQ ID NO: 2682 - DNA, 50 bp, Artificial Sequence
  Description of Artificial Sequence: Synthetic probe
caattcacctacaacaacaaaaattatctcaccctaaataaaaacctaca

SEQ ID NO: 2683 - DNA, 50 bp, Artificial Sequence
  Description of Artificial Sequence: Synthetic probe
aataaactctctaatactccacctcaaaaacatcatttaacttttactca

SEQ ID NO: 2684 - DNA, 50 bp, Artificial Sequence
  Description of Artificial Sequence: Synthetic probe
ataaaaccactccacacatatatcttccaaataaactctctaatactcca

SEQ ID NO: 2685 - DNA, 50 bp, Artificial Sequence
  Description of Artificial Sequence: Synthetic probe
acacaacaactcaaatctccaaacaaaaatcaaataatacctctaaaaca

SEQ ID NO: 2686 - DNA, 50 bp, Artificial Sequence
  Description of Artificial Sequence: Synthetic probe
aaaaacacaaaaatcctcatatcracaataaccctttttaacaaaatatc

SEQ ID NO: 2687 - DNA, 50 bp, Artificial Sequence
  Description of Artificial Sequence: Synthetic probe
aaaacacaaaaatcctcatatcaacaataaccctttttaacaaaatatca

SEQ ID NO: 2688 - DNA, 50 bp, Artificial Sequence
  Description of Artificial Sequence: Synthetic probe
aatttctatctataactcrtttctaattctaccaccrcrataccraaaac

SEQ ID NO: 2689 - DNA, 50 bp, Artificial Sequence
  Description of Artificial Sequence: Synthetic probe
racaactactacttaaacrccttcracatcrcrataacaaaactaaaaac

SEQ ID NO: 2690 - DNA, 50 bp, Artificial Sequence
  Description of Artificial Sequence: Synthetic probe
taaaaaattattatattcattccttaaatctcrcracrtcraaaaatcac

SEQ ID NO: 2691 - DNA, 50 bp, Artificial Sequence
  Description of Artificial Sequence: Synthetic probe
ccaatcrcrtaaacacataacrtttacractatctaaaaaacctaacrcc

SEQ ID NO: 2692 - DNA, 50 bp, Artificial Sequence
  Description of Artificial Sequence: Synthetic probe
ctctttattccccacctctaaccccatcctataaattcttctttatatcc

SEQ ID NO: 2693 - DNA, 50 bp, Artificial Sequence
  Description of Artificial Sequence: Synthetic probe
cactttcacactttaaaatttcactctaacttcaaaatacaacaaaaatc

SEQ ID NO: 2694 - DNA, 50 bp, Artificial Sequence
  Description of Artificial Sequence: Synthetic probe
atttttgtaggggggattagattgttttggaatttgtagataagtattta

SEQ ID NO: 2695 - DNA, 50 bp, Artificial Sequence
  Description of Artificial Sequence: Synthetic probe
tctttacaaaaaaaatcaaactactttaaaatttacaaataaacattcac

SEQ ID NO: 2696 - DNA, 50 bp, Artificial Sequence
  Description of Artificial Sequence: Synthetic probe
tcttcttatccttcttccctttcttcaccactttatctaaaaaattaaac

SEQ ID NO: 2697 - DNA, 50 bp, Artificial Sequence
  Description of Artificial Sequence: Synthetic probe
taggggggattagattgttttggaatttgtagataagtatttaygatgtt

SEQ ID NO: 2698 - DNA, 50 bp, Artificial Sequence
  Description of Artificial Sequence: Synthetic probe
aaaaaaaatcaaactactttaaaatttacaaataaacattcacratatcc

SEQ ID NO: 2699 - DNA, 50 bp, Artificial Sequence
  Description of Artificial Sequence: Synthetic probe
aaatcacaaaattaaaaaataccaaacrcataaaaaccctaaaaatctcc

SEQ ID NO: 2700 - DNA, 50 bp, Artificial Sequence
  Description of Artificial Sequence: Synthetic probe
agaattatagaattaggaagtgttagaygtatagggattttagagatttt

SEQ ID NO: 2701 - DNA, 50 bp, Artificial Sequence
  Description of Artificial Sequence: Synthetic probe
ctccaccttcaattacattatattaaaaattacatttataaaaacataac

SEQ ID NO: 2702 - DNA, 50 bp, Artificial Sequence
  Description of Artificial Sequence: Synthetic probe
aatggtataagataaatggtatgaatgtgtatttatgaaatgtgataayg

SEQ ID NO: 2703 - DNA, 50 bp, Artificial Sequence
  Description of Artificial Sequence: Synthetic probe
ccaccttcaattacattatattaaaaattacatttataaaaacataacrc

SEQ ID NO: 2704 - DNA, 50 bp, Artificial Sequence
  Description of Artificial Sequence: Synthetic probe
ggaatggtataagataaatggtatgaatgtgtatttatgaaatgtgataa

SEQ ID NO: 2705 - DNA, 50 bp, Artificial Sequence
  Description of Artificial Sequence: Synthetic probe
ctccccaaaacactaaacttaccacataaaacccttacratataccattc

SEQ ID NO: 2706 - DNA, 50 bp, Artificial Sequence
  Description of Artificial Sequence: Synthetic probe
aaaactaaccacaaccaaaaaacacctactctccatacaacraaactcac

SEQ ID NO: 2707 - DNA, 50 bp, Artificial Sequence
  Description of Artificial Sequence: Synthetic probe
acactaaacttaccacataaaacccttacratataccattcrtaaatctc

SEQ ID NO: 2708 - DNA, 50 bp, Artificial Sequence
  Description of Artificial Sequence: Synthetic probe
ctaatacccataatacaactaaaaacaaccaccraaaaaaaaactatctc

SEQ ID NO: 2709 - DNA, 50 bp, Artificial Sequence
  Description of Artificial Sequence: Synthetic probe
tttggtatttatggtataattggaaatagttatyggagagagaattgttt

SEQ ID NO: 2710 - DNA, 50 bp, Artificial Sequence
  Description of Artificial Sequence: Synthetic probe
ttggtatttatggtataattggaaatagttattggagagagaattgtttt

SEQ ID NO: 2711 - DNA, 50 bp, Artificial Sequence
  Description of Artificial Sequence: Synthetic probe
aaaaaaattttcaacatacatctaatatctaaaaccaacaaacaaaatac

SEQ ID NO: 2712 - DNA, 50 bp, Artificial Sequence
  Description of Artificial Sequence: Synthetic probe
catctttacattattcctaattcratatcctactcaccacaaccacctcc

SEQ ID NO: 2713 - DNA, 50 bp, Artificial Sequence
  Description of Artificial Sequence: Synthetic probe
taatcacraaacttatatccacaactacctctaacataataaaacacaac

SEQ ID NO: 2714 - DNA, 50 bp, Artificial Sequence
  Description of Artificial Sequence: Synthetic probe
caccaaaacctaatactacracrttcctacaaatttcraataaacctaac

SEQ ID NO: 2715 - DNA, 50 bp, Artificial Sequence
  Description of Artificial Sequence: Synthetic probe
rtaaaccaccrcrcccaaccraacaaactattttatataacataaatacc

SEQ ID NO: 2716 - DNA, 50 bp, Artificial Sequence
  Description of Artificial Sequence: Synthetic probe
actaaattttaaaaaataccratatttatatcacataaaacaatttactc

SEQ ID NO: 2717 - DNA, 50 bp, Artificial Sequence
  Description of Artificial Sequence: Synthetic probe
tgttaggttttgggaggtgtyggtatttatgttatataaaatagtttgtt

SEQ ID NO: 2718 - DNA, 50 bp, Artificial Sequence
  Description of Artificial Sequence: Synthetic probe
aaaaaataccratatttatatcacataaaacaatttactcractaaacrc

SEQ ID NO: 2719 - DNA, 50 bp, Artificial Sequence
  Description of Artificial Sequence: Synthetic probe
ctaaaatacaataaaaatatctcctttcactacrcctcctaaattcaaac

SEQ ID NO: 2720 - DNA, 50 bp, Artificial Sequence
  Description of Artificial Sequence: Synthetic probe
caatctatattccttaaatataaaattcatcaataaaatcctcaacatac

SEQ ID NO: 2721 - DNA, 50 bp, Artificial Sequence
  Description of Artificial Sequence: Synthetic probe
aataaaaaatcctatctcatatattaaaccttacaacctaataaatttcc

SEQ ID NO: 2722 - DNA, 50 bp, Artificial Sequence
  Description of Artificial Sequence: Synthetic probe
raaaatatcccrcrcttacrcactacaaactcraaaaaaacractaaaac

SEQ ID NO: 2723 - DNA, 50 bp, Artificial Sequence
  Description of Artificial Sequence: Synthetic probe
tttaaaaaacaacttaaaaatacattaatctacccaacrcrataactcac

SEQ ID NO: 2724 - DNA, 50 bp, Artificial Sequence
  Description of Artificial Sequence: Synthetic probe
aaatccaaatctcctacccacrtaaaaaacttctaatttcacaaatcccc

SEQ ID NO: 2725 - DNA, 50 bp, Artificial Sequence
  Description of Artificial Sequence: Synthetic probe
cratttctctaaactattttattctttaaacatactctccaaacaacatc

SEQ ID NO: 2726 - DNA, 50 bp, Artificial Sequence
  Description of Artificial Sequence: Synthetic probe
ttattgttttgaaagagaaataaaattgtagtaagggttttttaggatag

SEQ ID NO: 2727 - DNA, 50 bp, Artificial Sequence
  Description of Artificial Sequence: Synthetic probe
catttacaaaacaaaaaccccataaaaaccaaaccratacccacccattc

SEQ ID NO: 2728 - DNA, 50 bp, Artificial Sequence
  Description of Artificial Sequence: Synthetic probe
gggaagatygaggatttataagatgttatttaaaagggtttttaayggtt

SEQ ID NO: 2729 - DNA, 50 bp, Artificial Sequence
  Description of Artificial Sequence: Synthetic probe
aaaaaaccraaaacttataaaatattacttaaaaaaacttctaacratcc

SEQ ID NO: 2730 - DNA, 50 bp, Artificial Sequence
  Description of Artificial Sequence: Synthetic probe
ataaactacrctaaacrctacctttcacaaaaaaccaaaaaccccaacrc

SEQ ID NO: 2731 - DNA, 50 bp, Artificial Sequence
  Description of Artificial Sequence: Synthetic probe
actcattaaaaaaaaccacacacccccattttctcracatatctattcac

SEQ ID NO: 2732 - DNA, 50 bp, Artificial Sequence
  Description of Artificial Sequence: Synthetic probe
aaattaattttacttactttcataacccctaaaaaaaacttttttaaaac

SEQ ID NO: 2733 - DNA, 50 bp, Artificial Sequence
  Description of Artificial Sequence: Synthetic probe
attaaatcctaaaaaactcattaaaaaaaaccacacacccccattttctc

SEQ ID NO: 2734 - DNA, 50 bp, Artificial Sequence
  Description of Artificial Sequence: Synthetic probe
tgtttttatggtttttaagagagatttttttagggygtgaatagatatgt

SEQ ID NO: 2735 - DNA, 50 bp, Artificial Sequence
  Description of Artificial Sequence: Synthetic probe
aaaacataactaaataaacaaacctctctacaaataaaatttaactcctc

SEQ ID NO: 2736 - DNA, 50 bp, Artificial Sequence
  Description of Artificial Sequence: Synthetic probe
aggaatatggttagataaatagatttttttgtagatgaggtttagttttt

SEQ ID NO: 2737 - DNA, 50 bp, Artificial Sequence
  Description of Artificial Sequence: Synthetic probe
aaactttactatcrctatcrtcactacacaattattcctaattcaacrac

SEQ ID NO: 2738 - DNA, 50 bp, Artificial Sequence
  Description of Artificial Sequence: Synthetic probe
ccaaaactttactatcrctatcrtcactacacaattattcctaattcaac

SEQ ID NO: 2739 - DNA, 50 bp, Artificial Sequence
  Description of Artificial Sequence: Synthetic probe
aatataactcaaataatccrccrctaaatcaaaaacaattatacaataac

SEQ ID NO: 2740 - DNA, 50 bp, Artificial Sequence
  Description of Artificial Sequence: Synthetic probe
ataaaacaacaaacctaactcactcctatatcaaaaattataaaaaacrc

SEQ ID NO: 2741 - DNA, 50 bp, Artificial Sequence
  Description of Artificial Sequence: Synthetic probe
aaataaaacaacaaacctaactcactcctatatcaaaaattataaaaaac

SEQ ID NO: 2742 - DNA, 50 bp, Artificial Sequence
  Description of Artificial Sequence: Synthetic probe
cctactacctcacctaaatactactacactactaaccacaaacccaaaac

SEQ ID NO: 2743 - DNA, 50 bp, Artificial Sequence
  Description of Artificial Sequence: Synthetic probe
gtttgttgttttatttgggtattgttgtattgttgattataggtttagaa

SEQ ID NO: 2744 - DNA, 50 bp, Artificial Sequence
  Description of Artificial Sequence: Synthetic probe
cctcacctaaatactactacactactaaccacaaacccaaaacraaaaac

SEQ ID NO: 2745 - DNA, 50 bp, Artificial Sequence
  Description of Artificial Sequence: Synthetic probe
gttttatttgggtattgttgtattgttgattataggtttagaayggggga

SEQ ID NO: 2746 - DNA, 50 bp, Artificial Sequence
  Description of Artificial Sequence: Synthetic probe
cccaccccaaattctacttcaaaataacccaatctaaaacacctactacc

SEQ ID NO: 2747 - DNA, 50 bp, Artificial Sequence
  Description of Artificial Sequence: Synthetic probe
ttttcccttccctatcctattttcttcaatctttctcctaaaaacctccc

SEQ ID NO: 2748 - DNA, 50 bp, Artificial Sequence
  Description of Artificial Sequence: Synthetic probe
tattttgaagtagaatttggggtggggatttttgtttaagagatatattg

SEQ ID NO: 2749 - DNA, 50 bp, Artificial Sequence
  Description of Artificial Sequence: Synthetic probe
aaaacaacaaattacaccaatcaattacacttaaaaacataaaaactaac

SEQ ID NO: 2750 - DNA, 50 bp, Artificial Sequence
  Description of Artificial Sequence: Synthetic probe
caactatcttaataaattctcttacccctaaaccrccaacccaaataacc

SEQ ID NO: 2751 - DNA, 50 bp, Artificial Sequence
  Description of Artificial Sequence: Synthetic probe
tacctttctctacctacaactatcttaataaattctcttacccctaaacc

SEQ ID NO: 2752 - DNA, 50 bp, Artificial Sequence
  Description of Artificial Sequence: Synthetic probe
tatataaaccaccaaaatatttcaaaaaaacaacractatctaaactaac

SEQ ID NO: 2753 - DNA, 50 bp, Artificial Sequence
  Description of Artificial Sequence: Synthetic probe
atacatcccaattacaaaactaaacaacracaaacccactttcacacaac

SEQ ID NO: 2754 - DNA, 50 bp, Artificial Sequence
  Description of Artificial Sequence: Synthetic probe
aaacaaaataaaaaataactacaaactaatcccaaaaccaaacaactaac

SEQ ID NO: 2755 - DNA, 50 bp, Artificial Sequence
  Description of Artificial Sequence: Synthetic probe
tatgtattttaattgtagagttaggtagyggtaagtttatttttatatag

SEQ ID NO: 2756 - DNA, 50 bp, Artificial Sequence
  Description of Artificial Sequence: Synthetic probe
tattaaatataaaactaactacaacrtcaactaacaaataacrtaaaaac

SEQ ID NO: 2757 - DNA, 50 bp, Artificial Sequence
  Description of Artificial Sequence: Synthetic probe
aattataaacatataccaccataccractaaatttatatttaataaaaac

SEQ ID NO: 2758 - DNA, 50 bp, Artificial Sequence
  Description of Artificial Sequence: Synthetic probe
tcattaaactaactttataacatcaattctaaaacatcctacttacaaac

SEQ ID NO: 2759 - DNA, 50 bp, Artificial Sequence
  Description of Artificial Sequence: Synthetic probe
tttcttttatcaaataaaaaattcctttataatttaaataatttcactcc

SEQ ID NO: 2760 - DNA, 50 bp, Artificial Sequence
  Description of Artificial Sequence: Synthetic probe
rccattttaaacataattaacacaactaccrtcatctatatctacaaccc

SEQ ID NO: 2761 - DNA, 50 bp, Artificial Sequence
  Description of Artificial Sequence: Synthetic probe
accctaaacttattatacaaataaactctctcraaaaataccattttatc

SEQ ID NO: 2762 - DNA, 50 bp, Artificial Sequence
  Description of Artificial Sequence: Synthetic probe
cacaaattaatttaatcaaatatttatttacataactaaaaaaactaacc

SEQ ID NO: 2763 - DNA, 50 bp, Artificial Sequence
  Description of Artificial Sequence: Synthetic probe
aaaacaactaaaaacaaataaaccraatttataatccaacttaaaaaaac

SEQ ID NO: 2764 - DNA, 50 bp, Artificial Sequence
  Description of Artificial Sequence: Synthetic probe
aaaataaatacccraaatttaccatcccataccaaaaaaatataaaacac

SEQ ID NO: 2765 - DNA, 50 bp, Artificial Sequence
  Description of Artificial Sequence: Synthetic probe
aaaaaaaacttacaataataaaatccctattaaaaatcaaaaatctcccc

SEQ ID NO: 2766 - DNA, 50 bp, Artificial Sequence
  Description of Artificial Sequence: Synthetic probe
ttctcccctcccatttaatactctacttcctcttacatactataaaaaac

SEQ ID NO: 2767 - DNA, 50 bp, Artificial Sequence
  Description of Artificial Sequence: Synthetic probe
accaaaatcccaatttcttaattaactatctcaaaaatattatatataac

SEQ ID NO: 2768 - DNA, 50 bp, Artificial Sequence
  Description of Artificial Sequence: Synthetic probe
ttgtttttagatattttttatggttattggtgtaattggagggaagtttt

SEQ ID NO: 2769 - DNA, 50 bp, Artificial Sequence
  Description of Artificial Sequence: Synthetic probe
taaaatcraatctaaaactaccaacrctacctaactttatccraacrtcc

SEQ ID NO: 2770 - DNA, 50 bp, Artificial Sequence
  Description of Artificial Sequence: Synthetic probe
aaacactaaaactaaaccctccccttataaacaaaaaccaaacratcccc

SEQ ID NO: 2771 - DNA, 50 bp, Artificial Sequence
  Description of Artificial Sequence: Synthetic probe
ttccctaccttcctctcttaaaaatttatttccaacactatttccttccc

SEQ ID NO: 2772 - DNA, 50 bp, Artificial Sequence
  Description of Artificial Sequence: Synthetic probe
aaactatttcatctctctcccaaaactacrtcatctcaatctcctccttc

SEQ ID NO: 2773 - DNA, 50 bp, Artificial Sequence
  Description of Artificial Sequence: Synthetic probe
actaatatatatataaaaacccatctaatccrtcctctcrctcrctaatc

SEQ ID NO: 2774 - DNA, 50 bp, Artificial Sequence
  Description of Artificial Sequence: Synthetic probe
ataaaaaatcatttaaaaattctcaaaaacacaaaaaacctctaaaattc

SEQ ID NO: 2775 - DNA, 50 bp, Artificial Sequence
  Description of Artificial Sequence: Synthetic probe
tctaaaccccaaaataactaaaatttccctctcaaacccctaaaaatctc

SEQ ID NO: 2776 - DNA, 50 bp, Artificial Sequence
  Description of Artificial Sequence: Synthetic probe
ccccaaaataactaaaatttccctctcaaacccctaaaaatctcractcc

SEQ ID NO: 2777 - DNA, 50 bp, Artificial Sequence
  Description of Artificial Sequence: Synthetic probe
aaacctactaacaaacaaccccaaaatcactcraaaaacaacttcttccc

SEQ ID NO: 2778 - DNA, 50 bp, Artificial Sequence
  Description of Artificial Sequence: Synthetic probe
acccaaaaaaatcaaaacctaaacrtctaaacccccraatcccttaaaac

SEQ ID NO: 2779 - DNA, 50 bp, Artificial Sequence
  Description of Artificial Sequence: Synthetic probe
aactaaccaactaaatattaactaaacraaaacttaacaattaaataccc

SEQ ID NO: 2780 - DNA, 50 bp, Artificial Sequence
  Description of Artificial Sequence: Synthetic probe
actcttaactaaacatttcttcccaacrcttccaacaaccaaaaacaaac

SEQ ID NO: 2781 - DNA, 50 bp, Artificial Sequence
  Description of Artificial Sequence: Synthetic probe
ttagttttggatatatttataggtttttagtaatagttagygagtttggg

SEQ ID NO: 2782 - DNA, 50 bp, Artificial Sequence
  Description of Artificial Sequence: Synthetic probe
caaaatttctaaaacaaaacaaacacaaaaactcatacatacatcaaccc

SEQ ID NO: 2783 - DNA, 50 bp, Artificial Sequence
  Description of Artificial Sequence: Synthetic probe
aaaatctaaccaaaaactaaaaacaaaaatatcactatctaaaataatcc

SEQ ID NO: 2784 - DNA, 50 bp, Artificial Sequence
  Description of Artificial Sequence: Synthetic probe
acctactttttactcaaccaaataccrctataccctaaacatacaaaacc

SEQ ID NO: 2785 - DNA, 50 bp, Artificial Sequence
  Description of Artificial Sequence: Synthetic probe
tcccaaacaataacatctctacttccaactcctaatcaaattccactacc

SEQ ID NO: 2786 - DNA, 50 bp, Artificial Sequence
  Description of Artificial Sequence: Synthetic probe
craaacaactacaaatataccaaatataccaaatacctactataacraac

SEQ ID NO: 2787 - DNA, 50 bp, Artificial Sequence
  Description of Artificial Sequence: Synthetic probe
ctctcraaacaactacaaatataccaaatataccaaatacctactataac

SEQ ID NO: 2788 - DNA, 50 bp, Artificial Sequence
  Description of Artificial Sequence: Synthetic probe
aaacaataacatctctacttccaactcctaatcaaattccactaccrccc

SEQ ID NO: 2789 - DNA, 50 bp, Artificial Sequence
  Description of Artificial Sequence: Synthetic probe
accaaatattctctatacccctcttcaccctcaaattaaaaaacaataac

SEQ ID NO: 2790 - DNA, 50 bp, Artificial Sequence
  Description of Artificial Sequence: Synthetic probe
ctcaaattaaaaaacaataacraaaataaaacctaataccccrcaaaatc

SEQ ID NO: 2791 - DNA, 50 bp, Artificial Sequence
  Description of Artificial Sequence: Synthetic probe
acaatcrttataaatccacctacaaatactcctcctccttaaaaaacacc

SEQ ID NO: 2792 - DNA, 50 bp, Artificial Sequence
  Description of Artificial Sequence: Synthetic probe
aataaatctacaacractacacctaataactctaataaacacccaaaaac

SEQ ID NO: 2793 - DNA, 50 bp, Artificial Sequence
  Description of Artificial Sequence: Synthetic probe
tacaacractacacctaataactctaataaacacccaaaaacracatacc

SEQ ID NO: 2794 - DNA, 50 bp, Artificial Sequence
  Description of Artificial Sequence: Synthetic probe
ccaaaaacracataccraaaacctaaacaaaaaattctcccraaactacc

SEQ ID NO: 2795 - DNA, 50 bp, Artificial Sequence
  Description of Artificial Sequence: Synthetic probe
aaacaaaaaattctcccraaactaccractacrttactcccraaataatc

SEQ ID NO: 2796 - DNA, 50 bp, Artificial Sequence
  Description of Artificial Sequence: Synthetic probe
acaaaaaaacrcrtttaacatctactacactcatctaaactaaaaataac

SEQ ID NO: 2797 - DNA, 50 bp, Artificial Sequence
  Description of Artificial Sequence: Synthetic probe
aaccacctacccrccatctccaacttaaataaatacaataaataccaaac

SEQ ID NO: 2798 - DNA, 50 bp, Artificial Sequence
  Description of Artificial Sequence: Synthetic probe
cacctaaaaaaacracatccaataaaccttaaaacatataaatcaaatac

SEQ ID NO: 2799 - DNA, 50 bp, Artificial Sequence
  Description of Artificial Sequence: Synthetic probe
ctccttaaccacrctacctttcttcttattactaaaacaaaccaaaactc

SEQ ID NO: 2800 - DNA, 50 bp, Artificial Sequence
  Description of Artificial Sequence: Synthetic probe
aaaatctcaatcctacaaaaataaaaaataacrttcaccactaaaaacrc

SEQ ID NO: 2801 - DNA, 50 bp, Artificial Sequence
  Description of Artificial Sequence: Synthetic probe
tttttttgtttatttagtagaagttggttgagtgttygttttgtgttagg

SEQ ID NO: 2802 - DNA, 50 bp, Artificial Sequence
  Description of Artificial Sequence: Synthetic probe
accaaacataaataaaataaaaatctacaactaaaacctctaactctatc

SEQ ID NO: 2803 - DNA, 50 bp, Artificial Sequence
  Description of Artificial Sequence: Synthetic probe
aaatcttcatttcacccatacctaactacrccccacaatactatatactc

SEQ ID NO: 2804 - DNA, 50 bp, Artificial Sequence
  Description of Artificial Sequence: Synthetic probe
tttttggtttagtttatagtggttatttagagatttatgaggggtggtat

SEQ ID NO: 2805 - DNA, 50 bp, Artificial Sequence
  Description of Artificial Sequence: Synthetic probe
ccctaacccaacccacaataaccacttaaaaacccataaaaaataacacc

SEQ ID NO: 2806 - DNA, 50 bp, Artificial Sequence
  Description of Artificial Sequence: Synthetic probe
aaaccctaaaaaaataatactaaaaaaccttaaaccccccataattaccc

SEQ ID NO: 2807 - DNA, 50 bp, Artificial Sequence
  Description of Artificial Sequence: Synthetic probe
caaaaaactaaaccactcacccctccaaaaacaaccataaaactctaccc

SEQ ID NO: 2808 - DNA, 50 bp, Artificial Sequence
  Description of Artificial Sequence: Synthetic probe
tcttacccrcccacratatatccrtcataaataaaatcrttaaaatacac

SEQ ID NO: 2809 - DNA, 50 bp, Artificial Sequence
  Description of Artificial Sequence: Synthetic probe
tttttgttttatatygtttttgtggggtagataatgtatttatttgaggt

SEQ ID NO: 2810 - DNA, 50 bp, Artificial Sequence
  Description of Artificial Sequence: Synthetic probe
ccrcccctataaaacaaacaatatatttatctaaaaccrtatacctcaac

SEQ ID NO: 2811 - DNA, 50 bp, Artificial Sequence
  Description of Artificial Sequence: Synthetic probe
tacaaaaacctttcttacccrcccacratatatccrtcataaataaaatc

SEQ ID NO: 2812 - DNA, 50 bp, Artificial Sequence
  Description of Artificial Sequence: Synthetic probe
aaacaatatatttatctaaaaccrtatacctcaacractccacctataac

SEQ ID NO: 2813 - DNA, 50 bp, Artificial Sequence
  Description of Artificial Sequence: Synthetic probe
atttatctaaaaccrtatacctcaacractccacctataacraacatacc

SEQ ID NO: 2814 - DNA, 50 bp, Artificial Sequence
  Description of Artificial Sequence: Synthetic probe
tccaacaatatatattaacaaaaaaatacctttttcatacaatatcatac

SEQ ID NO: 2815 - DNA, 50 bp, Artificial Sequence
  Description of Artificial Sequence: Synthetic probe
aataaattaaataaaacctcaaaaaataacactaaaataaccactaaccc

SEQ ID NO: 2816 - DNA, 50 bp, Artificial Sequence
  Description of Artificial Sequence: Synthetic probe
ctctaataaaaacaacaaaatcaacaccacaaaaaaatcccaccctaacc

SEQ ID NO: 2817 - DNA, 50 bp, Artificial Sequence
  Description of Artificial Sequence: Synthetic probe
aaaataataaccaccaaacaaccrataaaaataacratcraactcccctc

SEQ ID NO: 2818 - DNA, 50 bp, Artificial Sequence
  Description of Artificial Sequence: Synthetic probe
acaacaaaaacaaaataataaccaccaaacaaccrataaaaataacratc

SEQ ID NO: 2819 - DNA, 50 bp, Artificial Sequence
  Description of Artificial Sequence: Synthetic probe
aataaccatcatcctactcctactactcatcattaccctcatactctaac

SEQ ID NO: 2820 - DNA, 50 bp, Artificial Sequence
  Description of Artificial Sequence: Synthetic probe
ttttygttattttatatgttayggttgtgtttattttgttgaggagtttg

SEQ ID NO: 2821 - DNA, 50 bp, Artificial Sequence
  Description of Artificial Sequence: Synthetic probe
tactctaacractacactaacrcaaactcctcaacaaaataaacacaacc

SEQ ID NO: 2822 - DNA, 50 bp, Artificial Sequence
  Description of Artificial Sequence: Synthetic probe
taacrcaaactcctcaacaaaataaacacaaccrtaacatataaaataac

SEQ ID NO: 2823 - DNA, 50 bp, Artificial Sequence
  Description of Artificial Sequence: Synthetic probe
cttaaaatactaataaactataccctacaaatcccactaaacrctaactc

SEQ ID NO: 2824 - DNA, 50 bp, Artificial Sequence
  Description of Artificial Sequence: Synthetic probe
accctcctcttaaaatactaataaactataccctacaaatcccactaaac

SEQ ID NO: 2825 - DNA, 50 bp, Artificial Sequence
  Description of Artificial Sequence: Synthetic probe
ccrtaacatataaaataacraaaaaaaaccaaaccccaacacraaccaac

SEQ ID NO: 2826 - DNA, 50 bp, Artificial Sequence
  Description of Artificial Sequence: Synthetic probe
aatataaaactcacaaaaaaaactactccccaactctaaatctactcaac

SEQ ID NO: 2827 - DNA, 50 bp, Artificial Sequence
  Description of Artificial Sequence: Synthetic probe
aataaaatcaaaacatctattctcccaaaccctccctaaaaaataaatac

SEQ ID NO: 2828 - DNA, 50 bp, Artificial Sequence
  Description of Artificial Sequence: Synthetic probe
aaacaccttaacaaaaacaataaactttaatcctaaaatacaactaaccc

SEQ ID NO: 2829 - DNA, 50 bp, Artificial Sequence
  Description of Artificial Sequence: Synthetic probe
cractaaaatccaataacaataatatacattaaaattaataactaaacac

SEQ ID NO: 2830 - DNA, 50 bp, Artificial Sequence
  Description of Artificial Sequence: Synthetic probe
caaccttatcataaaaataaaaaacatcacccrtattactcaacacacac

SEQ ID NO: 2831 - DNA, 50 bp, Artificial Sequence
  Description of Artificial Sequence: Synthetic probe
tatactaaacaacacraataatacctcccatccctataacaaaactaaac

SEQ ID NO: 2832 - DNA, 50 bp, Artificial Sequence
  Description of Artificial Sequence: Synthetic probe
crcataaaatactaaaaaaatacaacataaacccaatctctcactcaacc

SEQ ID NO: 2833 - DNA, 50 bp, Artificial Sequence
  Description of Artificial Sequence: Synthetic probe
aaaaactaaaatataaaaaactataactcttaaactattcctaatacctc

SEQ ID NO: 2834 - DNA, 50 bp, Artificial Sequence
  Description of Artificial Sequence: Synthetic probe
cctacaacctacaataaaaactatataaaacctaaaaaaccaaacrcccc

SEQ ID NO: 2835 - DNA, 50 bp, Artificial Sequence
  Description of Artificial Sequence: Synthetic probe
ccrataacrccctacaaaataacaatatcaacctcracataataaaaaac

SEQ ID NO: 2836 - DNA, 50 bp, Artificial Sequence
  Description of Artificial Sequence: Synthetic probe
acataaatattacccccrataacrccctacaaaataacaatatcaacctc

SEQ ID NO: 2837 - DNA, 50 bp, Artificial Sequence
  Description of Artificial Sequence: Synthetic probe
actacccctaaaaacaatacaaacacaacataaatattacccccrataac

SEQ ID NO: 2838 - DNA, 50 bp, Artificial Sequence
  Description of Artificial Sequence: Synthetic probe
tagaatagygttttttattatgtygaggttgatattgttattttgtaggg

SEQ ID NO: 2839 - DNA, 50 bp, Artificial Sequence
  Description of Artificial Sequence: Synthetic probe
aaaacaacrtcccccattataccraaactaacattattaccctacaaaac

SEQ ID NO: 2840 - DNA, 50 bp, Artificial Sequence
  Description of Artificial Sequence: Synthetic probe
ttaaaacraaatcraaatcraaaaaaatccactctaaaaaacccatcccc

SEQ ID NO: 2841 - DNA, 50 bp, Artificial Sequence
  Description of Artificial Sequence: Synthetic probe
gttatygggggtaatatttatgttgtgtttgtattgtttttaggggtagt

SEQ ID NO: 2842 - DNA, 50 bp, Artificial Sequence
  Description of Artificial Sequence: Synthetic probe
actacccccaaaaacaatcraaaataaaccccccaaaataaatttccctc

SEQ ID NO: 2843 - DNA, 50 bp, Artificial Sequence
  Description of Artificial Sequence: Synthetic probe
cccaaaaacaatcraaaataaaccccccaaaataaatttccctcratctc

SEQ ID NO: 2844 - DNA, 50 bp, Artificial Sequence
  Description of Artificial Sequence: Synthetic probe
aacaatcraaaataaaccccccaaaataaatttccctcratctcractcc

SEQ ID NO: 2845 - DNA, 50 bp, Artificial Sequence
  Description of Artificial Sequence: Synthetic probe
ccaaaataaatttccctcratctcractccrcttcaaaaaaaaacttaac

SEQ ID NO: 2846 - DNA, 50 bp, Artificial Sequence
  Description of Artificial Sequence: Synthetic probe
aacraattaacacrattacaaataactaaaattcctaactaaaaaaatac

SEQ ID NO: 2847 - DNA, 50 bp, Artificial Sequence
  Description of Artificial Sequence: Synthetic probe
aatacctacccaatatctaaccctattatatactctaataccatacctac

SEQ ID NO: 2848 - DNA, 50 bp, Artificial Sequence
  Description of Artificial Sequence: Synthetic probe
ataccatacctacrcatccccctaaccaaaaaccttaatcatttataacc

SEQ ID NO: 2849 - DNA, 50 bp, Artificial Sequence
  Description of Artificial Sequence: Synthetic probe
tacrcatccccctaaccaaaaaccttaatcatttataaccrtattaatcc

SEQ ID NO: 2850 - DNA, 50 bp, Artificial Sequence
  Description of Artificial Sequence: Synthetic probe
caaaaaccttaatcatttataaccrtattaatccrtttaaccctataacc

SEQ ID NO: 2851 - DNA, 50 bp, Artificial Sequence
  Description of Artificial Sequence: Synthetic probe
gttgtygattttatataggtgtatttggagaaagaagttygtttgttagg

SEQ ID NO: 2852 - DNA, 50 bp, Artificial Sequence
  Description of Artificial Sequence: Synthetic probe
taaccrcctaacaaacraacttctttctccaaatacacctatataaaatc

SEQ ID NO: 2853 - DNA, 50 bp, Artificial Sequence
  Description of Artificial Sequence: Synthetic probe
tttaygtatattaagggggaaattaagattaattagattttgagggttgt

SEQ ID NO: 2854 - DNA, 50 bp, Artificial Sequence
  Description of Artificial Sequence: Synthetic probe
gattggaagattggagttyggtaagattaagaaatttgtttgtagtttgg

SEQ ID NO: 2855 - DNA, 50 bp, Artificial Sequence
  Description of Artificial Sequence: Synthetic probe
actaaaaaactaaaacccracaaaattaaaaaatttacctacaacctaac

SEQ ID NO: 2856 - DNA, 50 bp, Artificial Sequence
  Description of Artificial Sequence: Synthetic probe
aaaaaaaacrtacacactctaaacratttccacraattaacrattaacac

SEQ ID NO: 2857 - DNA, 50 bp, Artificial Sequence
  Description of Artificial Sequence: Synthetic probe
tagaaattaagatttattgagtatttagggttaagtaaggtgtattggat

SEQ ID NO: 2858 - DNA, 50 bp, Artificial Sequence
  Description of Artificial Sequence: Synthetic probe
aaatacttaaaatcaaataaaatacactaaatcrtattaatcrttaactc

SEQ ID NO: 2859 - DNA, 50 bp, Artificial Sequence
  Description of Artificial Sequence: Synthetic probe
aagaaaaggaaagaaaagaaagaaagygtatatattttgggyggttttta

SEQ ID NO: 2860 - DNA, 50 bp, Artificial Sequence
  Description of Artificial Sequence: Synthetic probe
aaatcaaataaaatacactaaatcrtattaatcrttaactcrtaaaaacc

SEQ ID NO: 2861 - DNA, 50 bp, Artificial Sequence
  Description of Artificial Sequence: Synthetic probe
taactaaaaatattaaaaaacaaacaacccaaacrtctctatacttctcc

SEQ ID NO: 2862 - DNA, 50 bp, Artificial Sequence
  Description of Artificial Sequence: Synthetic probe
atacctatcccaaataaatcatcaaaaccacacaaaaccraaaaaaaccc

SEQ ID NO: 2863 - DNA, 50 bp, Artificial Sequence
  Description of Artificial Sequence: Synthetic probe
tatgtttattttagatgagttattagagttatatagagtygagaggagtt

SEQ ID NO: 2864 - DNA, 50 bp, Artificial Sequence
  Description of Artificial Sequence: Synthetic probe
ccccataaaattaaaataatacacactccaaaccraacrcrataactcac

SEQ ID NO: 2865 - DNA, 50 bp, Artificial Sequence
  Description of Artificial Sequence: Synthetic probe
taattctaccttcrcraaaccaactaatccaacttctaatatctcccctc

SEQ ID NO: 2866 - DNA, 50 bp, Artificial Sequence
  Description of Artificial Sequence: Synthetic probe
tttcctcrcattttttcaccatctttccctcaatctccaaaaaccaatac

SEQ ID NO: 2867 - DNA, 50 bp, Artificial Sequence
  Description of Artificial Sequence: Synthetic probe
tctacctttctattcttttcaaaaaaaatctcracrttactaccccacac

SEQ ID NO: 2868 - DNA, 50 bp, Artificial Sequence
  Description of Artificial Sequence: Synthetic probe
gtatagtgtttttagttttagagatatttgatgagagattgatggttagg

SEQ ID NO: 2869 - DNA, 50 bp, Artificial Sequence
  Description of Artificial Sequence: Synthetic probe
cccacrttactactcccaacaacrtaaaatattccttttctaacacattc

SEQ ID NO: 2870 - DNA, 50 bp, Artificial Sequence
  Description of Artificial Sequence: Synthetic probe
aaaaaacaaaaattaactataaaaactcaaaatactaccccaaacaaccc

SEQ ID NO: 2871 - DNA, 50 bp, Artificial Sequence
  Description of Artificial Sequence: Synthetic probe
taaggagtaagggttgattgtagggatttagaatattgttttagataatt

SEQ ID NO: 2872 - DNA, 50 bp, Artificial Sequence
  Description of Artificial Sequence: Synthetic probe
caaaaactatatttctaccrcttccaaaaacrcttaacrtcrctataccc

SEQ ID NO: 2873 - DNA, 50 bp, Artificial Sequence
  Description of Artificial Sequence: Synthetic probe
cttttaaaaacracaaaaacataactcctaaaaacrcraaacttaaacac

SEQ ID NO: 2874 - DNA, 50 bp, Artificial Sequence
  Description of Artificial Sequence: Synthetic probe
ttccccrtaaataaaaaacctaataaacataatactctacaaaatcaccc

SEQ ID NO: 2875 - DNA, 50 bp, Artificial Sequence
  Description of Artificial Sequence: Synthetic probe
tatatcrcraatcrtctaaataaacraccacaaccacatctccaaacaac

SEQ ID NO: 2876 - DNA, 50 bp, Artificial Sequence
  Description of Artificial Sequence: Synthetic probe
atgtttatttttagatgtagaggttgtggtaggaattataaggttagaga

SEQ ID NO: 2877 - DNA, 50 bp, Artificial Sequence
  Description of Artificial Sequence: Synthetic probe
caaaaccaaaaacrctacctaaaaatataactataaccrttcatccaaac

SEQ ID NO: 2878 - DNA, 50 bp, Artificial Sequence
  Description of Artificial Sequence: Synthetic probe
aacraaccaaaatacaaaaacrcactaaatattactatatatcrcraatc

SEQ ID NO: 2879 - DNA, 50 bp, Artificial Sequence
  Description of Artificial Sequence: Synthetic probe
ccaaaaacrctacctaaaaatataactataaccrttcatccaaacractc

SEQ ID NO: 2880 - DNA, 50 bp, Artificial Sequence
  Description of Artificial Sequence: Synthetic probe
aacraaacraaccaaaatacaaaaacrcactaaatattactatatatcrc

SEQ ID NO: 2881 - DNA, 50 bp, Artificial Sequence
  Description of Artificial Sequence: Synthetic probe
ttaacraaacraaccaaaatacaaaaacrcactaaatattactatatatc

SEQ ID NO: 2882 - DNA, 50 bp, Artificial Sequence
  Description of Artificial Sequence: Synthetic probe
aaaaacrctacctaaaaatataactataaccrttcatccaaacractcrc

SEQ ID NO: 2883 - DNA, 50 bp, Artificial Sequence
  Description of Artificial Sequence: Synthetic probe
actataaccrttcatccaaacractcrcratacacaataatacccaatac

SEQ ID NO: 2884 - DNA, 50 bp, Artificial Sequence
  Description of Artificial Sequence: Synthetic probe
tctataactcaaaaattaacaaactaacccataatcctaatccaacttac

SEQ ID NO: 2885 - DNA, 50 bp, Artificial Sequence
  Description of Artificial Sequence: Synthetic probe
tattctaaaacttcacraatatcctcccracaaaaactaatatatctccc

SEQ ID NO: 2886 - DNA, 50 bp, Artificial Sequence
  Description of Artificial Sequence: Synthetic probe
ggttttttataattaggtaggttggaatttgatggttttattatagttgt

SEQ ID NO: 2887 - DNA, 50 bp, Artificial Sequence
  Description of Artificial Sequence: Synthetic probe
ttattttaagattttaygaatgttttttyggtagggattggtgtgttttt

SEQ ID NO: 2888 - DNA, 50 bp, Artificial Sequence
  Description of Artificial Sequence: Synthetic probe
ttaaccctacraaactctaactcctaaactaaatactctataccacactc

SEQ ID NO: 2889 - DNA, 50 bp, Artificial Sequence
  Description of Artificial Sequence: Synthetic probe
ccraaaaaccraatataacacaaaacacctaacccaaaaatcaaaactcc

SEQ ID NO: 2890 - DNA, 50 bp, Artificial Sequence
  Description of Artificial Sequence: Synthetic probe
aactataaacataaaacacataaccaaacaaaaacraaacttaaccctac

SEQ ID NO: 2891 - DNA, 50 bp, Artificial Sequence
  Description of Artificial Sequence: Synthetic probe
crcaaaaaattacataactataaacataaaacacataaccaaacaaaaac

SEQ ID NO: 2892 - DNA, 50 bp, Artificial Sequence
  Description of Artificial Sequence: Synthetic probe
taacacaaaacacctaacccaaaaatcaaaactccrcaaaaccaaatccc

SEQ ID NO: 2893 - DNA, 50 bp, Artificial Sequence
  Description of Artificial Sequence: Synthetic probe
gygtagaaggttatatgattatgagtatgaagtatatgattaggtaggag

SEQ ID NO: 2894 - DNA, 50 bp, Artificial Sequence
  Description of Artificial Sequence: Synthetic probe
crctcctacctaatcatatacttcatactcataatcatataaccttctac

SEQ ID NO: 2895 - DNA, 50 bp, Artificial Sequence
  Description of Artificial Sequence: Synthetic probe
gtttttttaggggtgagataaagaaatgttattttagggagttttgatyg

SEQ ID NO: 2896 - DNA, 50 bp, Artificial Sequence
  Description of Artificial Sequence: Synthetic probe
ctcctacctaatcatatacttcatactcataatcatataaccttctacrc

SEQ ID NO: 2897 - DNA, 50 bp, Artificial Sequence
  Description of Artificial Sequence: Synthetic probe
ctttatctcacccctaaaaaaacctaaccactctaaaaccacataaaaac

SEQ ID NO: 2898 - DNA, 50 bp, Artificial Sequence
  Description of Artificial Sequence: Synthetic probe
tctatatcttaaaatctattcccctcaaaaacccaaatacccaaaccccc

SEQ ID NO: 2899 - DNA, 50 bp, Artificial Sequence
  Description of Artificial Sequence: Synthetic probe
cttactaaaaaacaactaccctataaactaaatccccaacataaccatac

SEQ ID NO: 2900 - DNA, 50 bp, Artificial Sequence
  Description of Artificial Sequence: Synthetic probe
ttttgttgaagggtagttgttttgtgagttgggtttttaatatgattatg

SEQ ID NO: 2901 - DNA, 50 bp, Artificial Sequence
  Description of Artificial Sequence: Synthetic probe
tcacaaaacaactacccttcaacaaaataaaaacccttcaataccctacc

SEQ ID NO: 2902 - DNA, 50 bp, Artificial Sequence
  Description of Artificial Sequence: Synthetic probe
ttcctctctcctacaaaccctacaaaccttatccctctaataaatacttc

SEQ ID NO: 2903 - DNA, 50 bp, Artificial Sequence
  Description of Artificial Sequence: Synthetic probe
taaaaccaacaaatataacccttataaaaacaaaaccttcracctaaatc

SEQ ID NO: 2904 - DNA, 50 bp, Artificial Sequence
  Description of Artificial Sequence: Synthetic probe
ctcacctatactacaaccacaataaccaactctacaaaatccaaatttcc

SEQ ID NO: 2905 - DNA, 50 bp, Artificial Sequence
  Description of Artificial Sequence: Synthetic probe
atttatttgtgttgtagttataatggttagttttgtagggtttaaatttt

SEQ ID NO: 2906 - DNA, 50 bp, Artificial Sequence
  Description of Artificial Sequence: Synthetic probe
tttaaaccctacaaaactaaccattataactacaacacaaataaatcatc

SEQ ID NO: 2907 - DNA, 50 bp, Artificial Sequence
  Description of Artificial Sequence: Synthetic probe
taaaaacaaaatataaatctcaaaacatctatcccacactcaaaaatccc

SEQ ID NO: 2908 - DNA, 50 bp, Artificial Sequence
  Description of Artificial Sequence: Synthetic probe
aacaaaaacaaaacttctaatactactaccacctacatacaaactacctc

SEQ ID NO: 2909 - DNA, 50 bp, Artificial Sequence
  Description of Artificial Sequence: Synthetic probe
aaaaatatcracaactctaaacctcaaaaactaacaaatacaaatcrccc

SEQ ID NO: 2910 - DNA, 50 bp, Artificial Sequence
  Description of Artificial Sequence: Synthetic probe
ccttccaacraacracttacacctatcaatctctaaaatccaaaactacc

SEQ ID NO: 2911 - DNA, 50 bp, Artificial Sequence
  Description of Artificial Sequence: Synthetic probe
aagtattgaggataaagygaagagtattttagattttgttgtagaaatgt

SEQ ID NO: 2912 - DNA, 50 bp, Artificial Sequence
  Description of Artificial Sequence: Synthetic probe
aaaaccaaatacrataactcacrcctataattccatcactcaaaaaaacc

SEQ ID NO: 2913 - DNA, 50 bp, Artificial Sequence
  Description of Artificial Sequence: Synthetic probe
tattcctttataacrcataaacrcctataaaataaatactaaattacccc

SEQ ID NO: 2914 - DNA, 50 bp, Artificial Sequence
  Description of Artificial Sequence: Synthetic probe
aacttccaaatcctacttccctaaaaaactcatacrtcctaacttccaac

SEQ ID NO: 2915 - DNA, 50 bp, Artificial Sequence
  Description of Artificial Sequence: Synthetic probe
acccaaataacctatcccaaaatcatcctcttattcctaaaaatacaacc

SEQ ID NO: 2916 - DNA, 50 bp, Artificial Sequence
  Description of Artificial Sequence: Synthetic probe
tacttcctaaaatcaaactaaaacaaattaatcccctaaaacaacttaac

SEQ ID NO: 2917 - DNA, 50 bp, Artificial Sequence
  Description of Artificial Sequence: Synthetic probe
tcraaactcctattaaaaatccccccaactccttaataacaaccctaaac

SEQ ID NO: 2918 - DNA, 50 bp, Artificial Sequence
  Description of Artificial Sequence: Synthetic probe
tacrcrtcaaaacttttcttatttaataaaattataataactaacaatac

SEQ ID NO: 2919 - DNA, 50 bp, Artificial Sequence
  Description of Artificial Sequence: Synthetic probe
tataaaccaaaaaaacraatccrccrcraaaacaaaccccacraaaaaac

SEQ ID NO: 2920 - DNA, 50 bp, Artificial Sequence
  Description of Artificial Sequence: Synthetic probe
aacttttcttatttaataaaattataataactaacaatacratcccraac

SEQ ID NO: 2921 - DNA, 50 bp, Artificial Sequence
  Description of Artificial Sequence: Synthetic probe
ttatttaataaaattataataactaacaatacratcccraacrcctcccc

SEQ ID NO: 2922 - DNA, 50 bp, Artificial Sequence
  Description of Artificial Sequence: Synthetic probe
ggtaattaataaatgtttttatttygtttggatggagtggaagttagggt

SEQ ID NO: 2923 - DNA, 50 bp, Artificial Sequence
  Description of Artificial Sequence: Synthetic probe
acaatcaataaatatttccactccrcctaaataaaataaaaaccaaaacc

SEQ ID NO: 2924 - DNA, 50 bp, Artificial Sequence
  Description of Artificial Sequence: Synthetic probe
gttaggttatttagaaggatygaggttaagatttttggttaagagatgtt

SEQ ID NO: 2925 - DNA, 50 bp, Artificial Sequence
  Description of Artificial Sequence: Synthetic probe
acatattattatataacctctaaacatcataaaacacctttctctacaac

SEQ ID NO: 2926 - DNA, 50 bp, Artificial Sequence
  Description of Artificial Sequence: Synthetic probe
atcataaaacacctttctctacaacraaaatcattcraaaactttctctc

SEQ ID NO: 2927 - DNA, 50 bp, Artificial Sequence
  Description of Artificial Sequence: Synthetic probe
ccccttattcacacataatcattcttaccaccttaaacraaactatccrc

SEQ ID NO: 2928 - DNA, 50 bp, Artificial Sequence
  Description of Artificial Sequence: Synthetic probe
caccccttattcacacataatcattcttaccaccttaaacraaactatcc

SEQ ID NO: 2929 - DNA, 50 bp, Artificial Sequence
  Description of Artificial Sequence: Synthetic probe
aaaacaaaataaaataaaattcacrttctaatctatatccaacttcacrc

SEQ ID NO: 2930 - DNA, 50 bp, Artificial Sequence
  Description of Artificial Sequence: Synthetic probe
taaaaacaaaataaaataaaattcacrttctaatctatatccaacttcac

SEQ ID NO: 2931 - DNA, 50 bp, Artificial Sequence
  Description of Artificial Sequence: Synthetic probe
cactaaaaaccaaaaacraaacaaaaactataaaccractaaaccatatc

SEQ ID NO: 2932 - DNA, 50 bp, Artificial Sequence
  Description of Artificial Sequence: Synthetic probe
tataaaaaaaatctaatctatcaccattaaaattacacacctataatccc

SEQ ID NO: 2933 - DNA, 50 bp, Artificial Sequence
  Description of Artificial Sequence: Synthetic probe
taattaaaaaccatcctccacccratatttcaatactcaaaaaaaacctc

SEQ ID NO: 2934 - DNA, 50 bp, Artificial Sequence
  Description of Artificial Sequence: Synthetic probe
ttttttttggttattttgattttattgtggttatttgtgggaaggaaggt

SEQ ID NO: 2935 - DNA, 50 bp, Artificial Sequence
  Description of Artificial Sequence: Synthetic probe
aaacaaaaaccaccatacccracctccaaaccattttaatctaaacctac

SEQ ID NO: 2936 - DNA, 50 bp, Artificial Sequence
  Description of Artificial Sequence: Synthetic probe
ataaatctcctacttatcctaaacctaaccaaaatacccttcccaaaacc

SEQ ID NO: 2937 - DNA, 50 bp, Artificial Sequence
  Description of Artificial Sequence: Synthetic probe
yggtaggattagttttaagggaattagtttttagattaatatgtgttttt

SEQ ID NO: 2938 - DNA, 50 bp, Artificial Sequence
  Description of Artificial Sequence: Synthetic probe
racaaaaccaattttaaaaaaatcaatttccaaattaatatatacccccc

SEQ ID NO: 2939 - DNA, 50 bp, Artificial Sequence
  Description of Artificial Sequence: Synthetic probe
caatatttcctatcccctcctaaaatccatacttaatcctcacatcrccc

SEQ ID NO: 2940 - DNA, 50 bp, Artificial Sequence
  Description of Artificial Sequence: Synthetic probe
acctatctccttaaacctcttcctcattccctcrattttattctaaaccc

SEQ ID NO: 2941 - DNA, 50 bp, Artificial Sequence
  Description of Artificial Sequence: Synthetic probe
aaaaaacaaaaaatattaaaaacaccaccttacraattcaaaataaaacc

SEQ ID NO: 2942 - DNA, 50 bp, Artificial Sequence
  Description of Artificial Sequence: Synthetic probe
aatcrtccctaaaaaaacctacctaaaactaaaatctaactccctaaacc

SEQ ID NO: 2943 - DNA, 50 bp, Artificial Sequence
  Description of Artificial Sequence: Synthetic probe
tagtygtttttggagagatttgtttgaaattggagtttggttttttgaat

SEQ ID NO: 2944 - DNA, 50 bp, Artificial Sequence
  Description of Artificial Sequence: Synthetic probe
accraaaactaaaaaaccctaaaacaatattaaaaaacctacctcctctc

SEQ ID NO: 2945 - DNA, 50 bp, Artificial Sequence
  Description of Artificial Sequence: Synthetic probe
acttctaaaaaactaacaaacttccaaacaaaaaaatccttaaaaaaaac

SEQ ID NO: 2946 - DNA, 50 bp, Artificial Sequence
  Description of Artificial Sequence: Synthetic probe
cttttaatctcaactccttaatctaaacctcccaaaaaaacccctaaaac

SEQ ID NO: 2947 - DNA, 50 bp, Artificial Sequence
  Description of Artificial Sequence: Synthetic probe
tatttttgaaaggttaatagatttttaggtagaaaggtttttgagggaaa

SEQ ID NO: 2948 - DNA, 50 bp, Artificial Sequence
  Description of Artificial Sequence: Synthetic probe
cctacctaatccrctaccccacaataaaaaacaccttattatacaataac

SEQ ID NO: 2949 - DNA, 50 bp, Artificial Sequence
  Description of Artificial Sequence: Synthetic probe
acaataacrtaatctcatctattccctccaaaactcacccaaaaaccttc

SEQ ID NO: 2950 - DNA, 50 bp, Artificial Sequence
  Description of Artificial Sequence: Synthetic probe
acaaaacctatcctccaccaacaaaaaaaatcttaaaatatacatcacrc

SEQ ID NO: 2951 - DNA, 50 bp, Artificial Sequence
  Description of Artificial Sequence: Synthetic probe
aacaaaaaaaatcttaaaatatacatcacrcraacctaatataataactc

SEQ ID NO: 2952 - DNA, 50 bp, Artificial Sequence
  Description of Artificial Sequence: Synthetic probe
aaaaaaatcaaaacaaccttaaaactcacraactaactaaataaaacctc

SEQ ID NO: 2953 - DNA, 50 bp, Artificial Sequence
  Description of Artificial Sequence: Synthetic probe
acrtacacctttccccctcctcccaacaaaataaaataaaactttaaaac

SEQ ID NO: 2954 - DNA, 50 bp, Artificial Sequence
  Description of Artificial Sequence: Synthetic probe
crcraaaatactccracrcatttaataaacccaaatttaaacrccactac

SEQ ID NO: 2955 - DNA, 50 bp, Artificial Sequence
  Description of Artificial Sequence: Synthetic probe
aaaaaatatacrcaaacrcaataacrtctaaatttaaacccactaaatac

SEQ ID NO: 2956 - DNA, 50 bp, Artificial Sequence
  Description of Artificial Sequence: Synthetic probe
aaatatacrcaaacrcaataacrtctaaatttaaacccactaaatacrtc

SEQ ID NO: 2957 - DNA, 50 bp, Artificial Sequence
  Description of Artificial Sequence: Synthetic probe
ctcccrccttccactttttctaattaattcacaaattttcccraattacc

SEQ ID NO: 2958 - DNA, 50 bp, Artificial Sequence
  Description of Artificial Sequence: Synthetic probe
aaaaacacataaactaaccaatcraaaacracacraaaacraactcrctc

SEQ ID NO: 2959 - DNA, 50 bp, Artificial Sequence
  Description of Artificial Sequence: Synthetic probe
taatactaaaccaacraaaaaaacccaaaacrctacrattcacaaaatac

SEQ ID NO: 2960 - DNA, 50 bp, Artificial Sequence
  Description of Artificial Sequence: Synthetic probe
cctaatttataccccraatataacccccatcaaaatctacaataacaacc

SEQ ID NO: 2961 - DNA, 50 bp, Artificial Sequence
  Description of Artificial Sequence: Synthetic probe
rtaatatttcaaacraatcaaaattccaaatcrcrccccaaactaaactc

SEQ ID NO: 2962 - DNA, 50 bp, Artificial Sequence
  Description of Artificial Sequence: Synthetic probe
ctaaaactataaaccaaataacttaatttctcctccacctactcctccac

SEQ ID NO: 2963 - DNA, 50 bp, Artificial Sequence
  Description of Artificial Sequence: Synthetic probe
ttatttgaaatattyggattttaggtgtagagttagaagtagttagggta

SEQ ID NO: 2964 - DNA, 50 bp, Artificial Sequence
  Description of Artificial Sequence: Synthetic probe
cacttcaaacacttctaataattaaaattaaacacttctcaaccraatac

SEQ ID NO: 2965 - DNA, 50 bp, Artificial Sequence
  Description of Artificial Sequence: Synthetic probe
atcctaaatctaatcctccccatcccactaccaaatcaatataatctcca

SEQ ID NO: 2966 - DNA, 50 bp, Artificial Sequence
  Description of Artificial Sequence: Synthetic probe
caacaatccaaaaacacaaatcctcattcaaaacaatataatccttacca

SEQ ID NO: 2967 - DNA, 50 bp, Artificial Sequence
  Description of Artificial Sequence: Synthetic probe
caatccaaaaacacaaatcctcattcaaaacaatataatccttaccatca

SEQ ID NO: 2968 - DNA, 50 bp, Artificial Sequence; identical to SEQ ID NO: 2967
  Description of Artificial Sequence: Synthetic probe

SEQ ID NO: 2969 - DNA, 50 bp, Artificial Sequence; identical to SEQ ID NO: 2967
  Description of Artificial Sequence: Synthetic probe

SEQ ID NO: 2970 - DNA, 50 bp, Artificial Sequence; identical to SEQ ID NO: 2967
  Description of Artificial Sequence: Synthetic probe

SEQ ID NO: 2971 - DNA, 50 bp, Artificial Sequence
  Description of Artificial Sequence: Synthetic probe
aaaaacacaaatcctcattcaaaacaatataatccttaccatcataaaca

SEQ ID NO: 2972 - DNA, 50 bp, Artificial Sequence; identical to SEQ ID NO: 2971
  Description of Artificial Sequence: Synthetic probe

SEQ ID NO: 2973 - DNA, 50 bp, Artificial Sequence; identical to SEQ ID NO: 2971
  Description of Artificial Sequence: Synthetic probe

SEQ ID NO: 2974 - DNA, 50 bp, Artificial Sequence; identical to SEQ ID NO: 2971
  Description of Artificial Sequence: Synthetic probe

SEQ ID NO: 2975 - DNA, 50 bp, Artificial Sequence
  Description of Artificial Sequence: Synthetic probe
tatccaccaaaaaatacaactaaaactaataaatttttttacacrtaaac

SEQ ID NO: 2976 - DNA, 50 bp, Artificial Sequence
  Description of Artificial Sequence: Synthetic probe
taccaatatccaccaaaaaatacaactaaaactaataaatttttttacac

SEQ ID NO: 2977 - DNA, 50 bp, Artificial Sequence
  Description of Artificial Sequence: Synthetic probe
tacaatcatatattatataatcttttatttaatctctcccttaacataac

SEQ ID NO: 2978 - DNA, 50 bp, Artificial Sequence
  Description of Artificial Sequence: Synthetic probe
ttttgttgtatttttatagtaggttgtgtaatggtttttatttagtttat

SEQ ID NO: 2979 - DNA, 50 bp, Artificial Sequence
  Description of Artificial Sequence: Synthetic probe
tttgttgtatttttatagtaggttgtgtaatggtttttatttagtttatt

SEQ ID NO: 2980 - DNA, 50 bp, Artificial Sequence
  Description of Artificial Sequence: Synthetic probe
tttactacatttttacaataaactatataataacctccatccaacccacc

SEQ ID NO: 2981 - DNA, 50 bp, Artificial Sequence
  Description of Artificial Sequence: Synthetic probe
cccaacacctcaaaataacctcataatcaaaaataaaataataaatcaca

SEQ ID NO: 2982 - DNA, 50 bp, Artificial Sequence
  Description of Artificial Sequence: Synthetic probe
accctccaactaaaaaatttcactaataaaaaataccraaaactccttac

SEQ ID NO: 2983 - DNA, 50 bp, Artificial Sequence
  Description of Artificial Sequence: Synthetic probe
ctattacaaacaaaactacaacatttacrtacaaacctctaaatatacac

SEQ ID NO: 2984 - DNA, 50 bp, Artificial Sequence
  Description of Artificial Sequence: Synthetic probe
aacatttaaaaaacccracaatatcaaaaactaacaaaaatcccatatac

SEQ ID NO: 2985 - DNA, 50 bp, Artificial Sequence
  Description of Artificial Sequence: Synthetic probe
ttaaataaattttaaaatctcaaccaaacttctaacaaaaaaataaactc

SEQ ID NO: 2986 - DNA, 50 bp, Artificial Sequence
  Description of Artificial Sequence: Synthetic probe
taaaaaaactcaccrctactatcataattcrtttactaaactacatcrtc

SEQ ID NO: 2987 - DNA, 50 bp, Artificial Sequence
  Description of Artificial Sequence: Synthetic probe
acttaaaaaaactcaccrctactatcataattcrtttactaaactacatc

SEQ ID NO: 2988 - DNA, 50 bp, Artificial Sequence
  Description of Artificial Sequence: Synthetic probe
aatcttaaccrcrcrtcctaatataacraacraacttaaaaaaactcacc

SEQ ID NO: 2989 - DNA, 50 bp, Artificial Sequence
  Description of Artificial Sequence: Synthetic probe
aactcatcctccaatttccaaataaaaaccttccraccaatcttaaccrc

SEQ ID NO: 2990 - DNA, 50 bp, Artificial Sequence
  Description of Artificial Sequence: Synthetic probe
ataactcatcctccaatttccaaataaaaaccttccraccaatcttaacc

SEQ ID NO: 2991 - DNA, 50 bp, Artificial Sequence
  Description of Artificial Sequence: Synthetic probe
ttaaaaactaaaaaataaaccataacatccctctctccacctcaaaactc

SEQ ID NO: 2992 - DNA, 50 bp, Artificial Sequence
  Description of Artificial Sequence: Synthetic probe
aaataacrctactacrctacttctactccctaaaaataaatacccaaaac

SEQ ID NO: 2993 - DNA, 50 bp, Artificial Sequence
  Description of Artificial Sequence: Synthetic probe
cactatataaaactccactacccacttataaattatccttctttctccac

SEQ ID NO: 2994 - DNA, 50 bp, Artificial Sequence
  Description of Artificial Sequence: Synthetic probe
attacactaattttttcaatccaacatttccaaaaatatacaataaaaac

SEQ ID NO: 2995 - DNA, 50 bp, Artificial Sequence
  Description of Artificial Sequence: Synthetic probe
ttttccaactctattttcctcrtttataactaaccaaccaaaccataaac

SEQ ID NO: 2996 - DNA, 50 bp, Artificial Sequence
  Description of Artificial Sequence: Synthetic probe
ataaacraatcataaacaatcrctcataacttaactaaccaatcacaaac

SEQ ID NO: 2997 - DNA, 50 bp, Artificial Sequence
  Description of Artificial Sequence: Synthetic probe
acacacaaccactatcrtcacacactcracctataacaaaaaatctatac

SEQ ID NO: 2998 - DNA, 50 bp, Artificial Sequence
  Description of Artificial Sequence: Synthetic probe
cactttatacaaaaactccataaacaaaacctatataactaaataacatc

SEQ ID NO: 2999 - DNA, 50 bp, Artificial Sequence
  Description of Artificial Sequence: Synthetic probe
ctaaaccctcaacaataacaactaccaactcaaccttaataaataacrac

SEQ ID NO: 3000 - DNA, 50 bp, Artificial Sequence
  Description of Artificial Sequence: Synthetic probe
caaaataaccataataactataataaacactacataaacacaacaattac

SEQ ID NO: 3001 - DNA, 50 bp, Artificial Sequence
  Description of Artificial Sequence: Synthetic probe
aataaccataataactataataaacactacataaacacaacaattacrtc

SEQ ID NO: 3002 - DNA, 50 bp, Artificial Sequence
  Description of Artificial Sequence: Synthetic probe
atatcccatttcaaataaaaaaatataacccaacttctttttttaaatcc

SEQ ID NO: 3003 - DNA, 50 bp, Artificial Sequence
  Description of Artificial Sequence: Synthetic probe
aaaatctttctatataaaaatacttatcaaaacattatttacaacaaaac

SEQ ID NO: 3004 - DNA, 50 bp, Artificial Sequence
  Description of Artificial Sequence: Synthetic probe
taaacatttttaattattttcatcacattatcacattaattctctaaatc

SEQ ID NO: 3005 - DNA, 50 bp, Artificial Sequence
  Description of Artificial Sequence: Synthetic probe
ttttgagttttagtatgttttgaaaggtgaggtggaatatgttagtatga

SEQ ID NO: 3006 - DNA, 50 bp, Artificial Sequence
  Description of Artificial Sequence: Synthetic probe
ccctcaaaaaaaaccattaccttttccttaaaaaaaactaaattaacttc

SEQ ID NO: 3007 - DNA, 50 bp, Artificial Sequence
  Description of Artificial Sequence: Synthetic probe
cctaaattcctctaaaaattatttaccaattacattcaaccacatttaac

SEQ ID NO: 3008 - DNA, 50 bp, Artificial Sequence
  Description of Artificial Sequence: Synthetic probe
ttgggatttgttttgtgttgtaatttagttatttatagaatgagaygttg

SEQ ID NO: 3009 - DNA, 50 bp, Artificial Sequence
  Description of Artificial Sequence: Synthetic probe
taaaatttattttatattataatttaactacccacaaaataaaacrctac

SEQ ID NO: 3010 - DNA, 50 bp, Artificial Sequence
  Description of Artificial Sequence: Synthetic probe
taaatcaacaacccaaaataatactaaatttataaacaccaaacctattc

SEQ ID NO: 3011 - DNA, 50 bp, Artificial Sequence
  Description of Artificial Sequence: Synthetic probe
tttttagaagtttaggggttattggagttygatttagtgtgtgtaatttt

SEQ ID NO: 3012 - DNA, 50 bp, Artificial Sequence
  Description of Artificial Sequence: Synthetic probe
ccttaaaaacctaaaaaccactaaaacccractcaatatatacaactccc

SEQ ID NO: 3013 - DNA, 50 bp, Artificial Sequence
  Description of Artificial Sequence: Synthetic probe
tactaaatttataaacaccaaacctattcraaaattacacacactaaatc

SEQ ID NO: 3014 - DNA, 50 bp, Artificial Sequence
  Description of Artificial Sequence: Synthetic probe
accacaaccatacaaaacactaaaatacaaaccaaaatatctataacaac

SEQ ID NO: 3015 - DNA, 50 bp, Artificial Sequence
  Description of Artificial Sequence: Synthetic probe
gtggggagtagtatgtttttgtatgttgtttgataaattgtagttttagt

SEQ ID NO: 3016 - DNA, 50 bp, Artificial Sequence
  Description of Artificial Sequence: Synthetic probe
taaaaaacaacatacctctacatactacctaacaaactacaaccccaacc

SEQ ID NO: 3017 - DNA, 50 bp, Artificial Sequence
  Description of Artificial Sequence: Synthetic probe
ctaaactaaaaaaaaacccttaaatccaccctatcctatatcacaatatc

SEQ ID NO: 3018 - DNA, 50 bp, Artificial Sequence
  Description of Artificial Sequence: Synthetic probe
tttattttttggttgttaagtggtttagtggtaatgtgagtttaagtgga

SEQ ID NO: 3019 - DNA, 50 bp, Artificial Sequence
  Description of Artificial Sequence: Synthetic probe
ccatcccttaactaccaaataacctaataacaatataaacccaaataaac

SEQ ID NO: 3020 - DNA, 50 bp, Artificial Sequence
  Description of Artificial Sequence: Synthetic probe
aataaaaccacrttttatactttctaaaacataacttcaccttcaaatac

SEQ ID NO: 3021 - DNA, 50 bp, Artificial Sequence
  Description of Artificial Sequence: Synthetic probe
ttaataaaaataaacaataacatttattctttataacactatcatcaccc

SEQ ID NO: 3022 - DNA, 50 bp, Artificial Sequence
  Description of Artificial Sequence: Synthetic probe
caaaaacccctaaaaataaaccccrcaaaaaaacacaaatattcactaac

SEQ ID NO: 3023 - DNA, 50 bp, Artificial Sequence
  Description of Artificial Sequence: Synthetic probe
ggtaatttttttgatgtgtttgaagayggttagatttgtggggtttttat

SEQ ID NO: 3024 - DNA, 50 bp, Artificial Sequence
  Description of Artificial Sequence: Synthetic probe
acaatctctctaatatacttaaaaacraccaaatctataaaattcccacc

SEQ ID NO: 3025 - DNA, 50 bp, Artificial Sequence
  Description of Artificial Sequence: Synthetic probe
tttctaactaaattactcctcataacaatctctctaatatacttaaaaac

SEQ ID NO: 3026 - DNA, 50 bp, Artificial Sequence
  Description of Artificial Sequence: Synthetic probe
accataaaaaacaacttaaccaaaaaaacttatttacctcctcaaaaaac

SEQ ID NO: 3027 - DNA, 50 bp, Artificial Sequence
  Description of Artificial Sequence: Synthetic probe
actttaaaaatttctatcaacacaaaactaatctaaacrcaataacttcc

SEQ ID NO: 3028 - DNA, 50 bp, Artificial Sequence
  Description of Artificial Sequence: Synthetic probe
cacaaaactaatctaaacrcaataacttccrataaaccactaaaacaaac

SEQ ID NO: 3029 - DNA, 50 bp, Artificial Sequence
  Description of Artificial Sequence: Synthetic probe
taaactctaacaaattaaaacaccacaaaaccaaccttcctaacratacc

SEQ ID NO: 3030 - DNA, 50 bp, Artificial Sequence
  Description of Artificial Sequence: Synthetic probe
actaatctaaacrcaataacttccrataaaccactaaaacaaacracatc

SEQ ID NO: 3031 - DNA, 50 bp, Artificial Sequence
  Description of Artificial Sequence: Synthetic probe
ccatcctaaactctaacaaattaaaacaccacaaaaccaaccttcctaac

SEQ ID NO: 3032 - DNA, 50 bp, Artificial Sequence
  Description of Artificial Sequence: Synthetic probe
acaaacrtcaacaacctcaaataaaacatataattctaataaaaataccc

SEQ ID NO: 3033 - DNA, 50 bp, Artificial Sequence
  Description of Artificial Sequence: Synthetic probe
aaactcraatatttctattaaaatcacatattttacttaaaattactaac

SEQ ID NO: 3034 - DNA, 50 bp, Artificial Sequence
  Description of Artificial Sequence: Synthetic probe
aaagttygggtatttttattagaattatatgttttatttgaggttgttga

SEQ ID NO: 3035 - DNA, 50 bp, Artificial Sequence
  Description of Artificial Sequence: Synthetic probe
ccctatatcccccatctactcatctaaataactataaaactaacrttatc

SEQ ID NO: 3036 - DNA, 50 bp, Artificial Sequence
  Description of Artificial Sequence: Synthetic probe
aaaactaaataataccttataaaaaaacaacrtttctcatttccracaac

SEQ ID NO: 3037 - DNA, 50 bp, Artificial Sequence
  Description of Artificial Sequence: Synthetic probe
atcctcccctatatcccccatctactcatctaaataactataaaactaac

SEQ ID NO: 3038 - DNA, 50 bp, Artificial Sequence
  Description of Artificial Sequence: Synthetic probe
tataggtataaatatttgtaggttatttttatagggatagtttygtgagg

SEQ ID NO: 3039 - DNA, 50 bp, Artificial Sequence
  Description of Artificial Sequence: Synthetic probe
acaaatacaaacacctacaaaccactcccacaaaaacaactccrtaaaac

SEQ ID NO: 3040 - DNA, 50 bp, Artificial Sequence
  Description of Artificial Sequence: Synthetic probe
tatcctaaaaaactaaaaataacacatcctaactaacrtcctccctaatc

SEQ ID NO: 3041 - DNA, 50 bp, Artificial Sequence
  Description of Artificial Sequence: Synthetic probe
caacctcctaccacaaacaacacttaacacttaaacaataacccaaaacc

SEQ ID NO: 3042 - DNA, 50 bp, Artificial Sequence
  Description of Artificial Sequence: Synthetic probe
aaaaaaaacrccaaccaaaatatatcatcctcaactcttcaaaacataac

SEQ ID NO: 3043 - DNA, 50 bp, Artificial Sequence
  Description of Artificial Sequence: Synthetic probe
aaaccrtctctcttaatcataaaaactactataacattatcctttcttcc

SEQ ID NO: 3044 - DNA, 50 bp, Artificial Sequence
  Description of Artificial Sequence: Synthetic probe
atygtatagtaatagtatttgtatatggagttgttttgtatttttggaat

SEQ ID NO: 3045 - DNA, 50 bp, Artificial Sequence
  Description of Artificial Sequence: Synthetic probe
tcrcacaacaacaacatctacatataaaattaccctacacttctaaaacc

SEQ ID NO: 3046 - DNA, 50 bp, Artificial Sequence
  Description of Artificial Sequence: Synthetic probe
aacaataaacaccctaaaaaccaactaaactcccctcttaaaatataatc

SEQ ID NO: 3047 - DNA, 50 bp, Artificial Sequence
  Description of Artificial Sequence: Synthetic probe
acrattccaaaaatacaaaacaactccatatacaaatactattactatac

SEQ ID NO: 3048 - DNA, 50 bp, Artificial Sequence
  Description of Artificial Sequence: Synthetic probe
atactcactaccctcaactaaatacctacaaaacatcaaatcctaaaaac

SEQ ID NO: 3049 - DNA, 50 bp, Artificial Sequence
  Description of Artificial Sequence: Synthetic probe
aaaactttactatatatctatcaattcatcctactccactaaaacctaac

SEQ ID NO: 3050 - DNA, 50 bp, Artificial Sequence
  Description of Artificial Sequence: Synthetic probe
aatacaaaaaacccaaaaaactacracrctcaaaatacrataacaacrcc

SEQ ID NO: 3051 - DNA, 50 bp, Artificial Sequence
  Description of Artificial Sequence: Synthetic probe
aaaataaaaataataccaaacaacaaattataacaactaaaattttccac

SEQ ID NO: 3052 - DNA, 50 bp, Artificial Sequence
  Description of Artificial Sequence: Synthetic probe
tttayggtagagtagaagtatttattatgtgtgatatttagtagatgggg

SEQ ID NO: 3053 - DNA, 50 bp, Artificial Sequence
  Description of Artificial Sequence: Synthetic probe
ttatggtagagtagaagtatttattatgtgtgatatttagtagatggggt

SEQ ID NO: 3054 - DNA, 50 bp, Artificial Sequence
  Description of Artificial Sequence: Synthetic probe
ccacrataaaataaaaacatccatcatatataacattcaacaaataaaac

SEQ ID NO: 3055 - DNA, 50 bp, Artificial Sequence; identical to SEQ ID NO: 3054
  Description of Artificial Sequence: Synthetic probe

SEQ ID NO: 3056 - DNA, 50 bp, Artificial Sequence
  Description of Artificial Sequence: Synthetic probe
cacaataaaataaaaacatccatcatatataacattcaacaaataaaaca

SEQ ID NO: 3057 - DNA, 50 bp, Artificial Sequence
  Description of Artificial Sequence: Synthetic probe
aacrtataaaaaatctttataaatctctcacattaaaaaaaactataatc

SEQ ID NO: 3058 - DNA, 50 bp, Artificial Sequence
  Description of Artificial Sequence: Synthetic probe
ratttaataaaacraccracraaaaaaacttaataaaacccrcrctcctc

SEQ ID NO: 3059 - DNA, 50 bp, Artificial Sequence
  Description of Artificial Sequence: Synthetic probe
cattaaataaacratcraaaaaccraaccaaataactaaatttccrcrac

SEQ ID NO: 3060 - DNA, 50 bp, Artificial Sequence
  Description of Artificial Sequence: Synthetic probe
caaatcaatataatattccraaaataaaaactaaaaaccctacatatcac

SEQ ID NO: 3061 - DNA, 50 bp, Artificial Sequence; identical to SEQ ID NO: 3060
  Description of Artificial Sequence: Synthetic probe

SEQ ID NO: 3062 - DNA, 50 bp, Artificial Sequence
  Description of Artificial Sequence: Synthetic probe
aaatcaatataatattccaaaaataaaaactaaaaaccctacatatcaca

SEQ ID NO: 3063 - DNA, 50 bp, Artificial Sequence; identical to SEQ ID NO: 3062
  Description of Artificial Sequence: Synthetic probe

SEQ ID NO: 3064 - DNA, 50 bp, Artificial Sequence; identical to SEQ ID NO: 3062
  Description of Artificial Sequence: Synthetic probe

SEQ ID NO: 3065 - DNA, 50 bp, Artificial Sequence; identical to SEQ ID NO: 3062
  Description of Artificial Sequence: Synthetic probe

SEQ ID NO: 3066 - DNA, 50 bp, Artificial Sequence
  Description of Artificial Sequence: Synthetic probe
ttttttatggtgaatgttattygtagygaggttttagagggtaatattat

SEQ ID NO: 3067 - DNA, 50 bp, Artificial Sequence
  Description of Artificial Sequence: Synthetic probe
tttttatggtgaatgttatttgtagtgaggttttagagggtaatattatt

SEQ ID NO: 3068 - DNA, 50 bp, Artificial Sequence; identical to SEQ ID NO: 3067
  Description of Artificial Sequence: Synthetic probe

SEQ ID NO: 3069 - DNA, 50 bp, Artificial Sequence; identical to SEQ ID NO: 3067
  Description of Artificial Sequence: Synthetic probe

SEQ ID NO: 3070 - DNA, 50 bp, Artificial Sequence; identical to SEQ ID NO: 3067
  Description of Artificial Sequence: Synthetic probe

SEQ ID NO: 3071 - DNA, 50 bp, Artificial Sequence
  Description of Artificial Sequence: Synthetic probe
cccccataataaatatcacccrcaacraaacctcaaaaaacaacatcacc

SEQ ID NO: 3072 - DNA, 50 bp, Artificial Sequence
  Description of Artificial Sequence: Synthetic probe
ccccataataaatatcacccacaacaaaacctcaaaaaacaacatcacca

SEQ ID NO: 3073 - DNA, 50 bp, Artificial Sequence
  Description of Artificial Sequence: Synthetic probe
tcatactcaatatatataaaaatctaattccaactcttctaaatccctca

SEQ ID NO: 3074 - DNA, 50 bp, Artificial Sequence
  Description of Artificial Sequence: Synthetic probe
caaactatcaatatcaataacrattctttcactccataatctaatccaac

SEQ ID NO: 3075 - DNA, 50 bp, Artificial Sequence
  Description of Artificial Sequence: Synthetic probe
aaactatcaatatcaataacaattctttcactccataatctaatccaaca

SEQ ID NO: 3076 - DNA, 50 bp, Artificial Sequence
  Description of Artificial Sequence: Synthetic probe
aaagtattaggatagtattgaggagtaggtggtaagttttgattagtttt

SEQ ID NO: 3077 - DNA, 50 bp, Artificial Sequence
  Description of Artificial Sequence: Synthetic probe
aaaataccaaaacaacaccraaaaacaaacracaaaccctaaccaatctc

SEQ ID NO: 3078 - DNA, 50 bp, Artificial Sequence
  Description of Artificial Sequence: Synthetic probe
aaataccaaaacaacaccaaaaaacaaacaacaaaccctaaccaatctca

SEQ ID NO: 3079 - DNA, 50 bp, Artificial Sequence
  Description of Artificial Sequence: Synthetic probe
ataaataatcccaatcctcrcaataaattccraaccacaaaattcaaaac

SEQ ID NO: 3080 - DNA, 50 bp, Artificial Sequence
  Description of Artificial Sequence: Synthetic probe
ataaattccraaccacaaaattcaaaacrcttacraacaaaaccrtacrc

SEQ ID NO: 3081 - DNA, 50 bp, Artificial Sequence
  Description of Artificial Sequence: Synthetic probe
cacaaattctcttaaacrtttcaactatataatctccttctcctcccttc

SEQ ID NO: 3082 - DNA, 50 bp, Artificial Sequence
  Description of Artificial Sequence: Synthetic probe
aaaacaaatctacaaatctaatcactaatctcattacaataacrctatac

SEQ ID NO: 3083 - DNA, 50 bp, Artificial Sequence
  Description of Artificial Sequence: Synthetic probe
ggaaataggtttgtaaatttggttattggttttattgtagtaaygttgtg

SEQ ID NO: 3084 - DNA, 50 bp, Artificial Sequence
  Description of Artificial Sequence: Synthetic probe
aaataggtttgtaaatttggttattggttttattgtagtaaygttgtgyg

SEQ ID NO: 3085 - DNA, 50 bp, Artificial Sequence
  Description of Artificial Sequence: Synthetic probe
aacaaatctacaaatctaatcactaatctcattacaataacrctatacrc

SEQ ID NO: 3086 - DNA, 50 bp, Artificial Sequence
  Description of Artificial Sequence: Synthetic probe
tatcccraaaaaaacaaaccaataaaaaccracctaataaaaaaaccrac

SEQ ID NO: 3087 - DNA, 50 bp, Artificial Sequence
  Description of Artificial Sequence: Synthetic probe
aataactaaaaatacaactccaaacttataaacacracctaaaccctatc

SEQ ID NO: 3088 - DNA, 50 bp, Artificial Sequence
  Description of Artificial Sequence: Synthetic probe
cttctaaatttccccaaatctccaaaccrctaaaattttctcttctaaac

SEQ ID NO: 3089 - DNA, 50 bp, Artificial Sequence
  Description of Artificial Sequence: Synthetic probe
tcataattaaccctaaattccraacctcaattttcactaaataaacratc

SEQ ID NO: 3090 - DNA, 50 bp, Artificial Sequence
  Description of Artificial Sequence: Synthetic probe
ctaaattccraacctcaattttcactaaataaacratcrctaaacraaac

SEQ ID NO: 3091 - DNA, 50 bp, Artificial Sequence
  Description of Artificial Sequence: Synthetic probe
aatattgtaagttatatatttgataagagattagtttttagaaggttagg

SEQ ID NO: 3092 - DNA, 50 bp, Artificial Sequence
  Description of Artificial Sequence: Synthetic probe
atattacaaatcatatatctaataaaaaattaatttccaaaaaaccaaac

SEQ ID NO: 3093 - DNA, 50 bp, Artificial Sequence
  Description of Artificial Sequence: Synthetic probe
tcrttcttatccttttacccatacrcatttcctacctcctcaaaaaaatc

SEQ ID NO: 3094 - DNA, 50 bp, Artificial Sequence
  Description of Artificial Sequence: Synthetic probe
ctacaactttaaaatctaccccaaaacaaaatcctaaatatacttaaaac

SEQ ID NO: 3095 - DNA, 50 bp, Artificial Sequence
  Description of Artificial Sequence: Synthetic probe
taattaccctcaaaatcttccttatcaaaaaccacaactttaaaaaaatc

SEQ ID NO: 3096 - DNA, 50 bp, Artificial Sequence
  Description of Artificial Sequence: Synthetic probe
atacaataacattatatacaaaaaactatatatatacttaataaaatctc

SEQ ID NO: 3097 - DNA, 50 bp, Artificial Sequence
  Description of Artificial Sequence: Synthetic probe
aacctccctattccctaaaacacaacaatattaaaaaaaataatccatac

SEQ ID NO: 3098 - DNA, 50 bp, Artificial Sequence
  Description of Artificial Sequence: Synthetic probe
aactactttaacaacttcttaaaataaaacaataatatttaccatttacc

SEQ ID NO: 3099 - DNA, 50 bp, Artificial Sequence
  Description of Artificial Sequence: Synthetic probe
tattaatactattttcccaacaacaaacaaacatcatatctccatatcac

SEQ ID NO: 3100 - DNA, 50 bp, Artificial Sequence
  Description of Artificial Sequence: Synthetic probe
taacaaatataataataaaaacrcttaaaacattttaaaaattccacaac

SEQ ID NO: 3101 - DNA, 50 bp, Artificial Sequence
  Description of Artificial Sequence: Synthetic probe
cattcactaaaaaaatatctattaaaaacaactctaaactaaatatactc

SEQ ID NO: 3102 - DNA, 50 bp, Artificial Sequence
  Description of Artificial Sequence: Synthetic probe
tttattaaacttcatcraaaatacaaatacctccrtataaaactctaatc

SEQ ID NO: 3103 - DNA, 50 bp, Artificial Sequence
  Description of Artificial Sequence: Synthetic probe
tttccttcatcttctcaacttctcctttacttcccctacaacaatctaac

SEQ ID NO: 3104 - DNA, 50 bp, Artificial Sequence
  Description of Artificial Sequence: Synthetic probe
actataatcacatctccccaaaaatctcctataacccattcctcaaaacc

SEQ ID NO: 3105 - DNA, 50 bp, Artificial Sequence
  Description of Artificial Sequence: Synthetic probe
aaaaaaatatccaaaactataaaaatcraatataaaaacccccccttaac

SEQ ID NO: 3106 - DNA, 50 bp, Artificial Sequence
  Description of Artificial Sequence: Synthetic probe
atcctaaaaactctttcactccctaaaaccctctacataaccctatcttc

SEQ ID NO: 3107 - DNA, 50 bp, Artificial Sequence
  Description of Artificial Sequence: Synthetic probe
aaaataacaaaaacaaacctaaaacaaccccraaaaataaaatcaccccc

SEQ ID NO: 3108 - DNA, 50 bp, Artificial Sequence
  Description of Artificial Sequence: Synthetic probe
aaatcctacacacaaatcaatcaataacccaaaaaacccccctcraaatc

SEQ ID NO: 3109 - DNA, 50 bp, Artificial Sequence
  Description of Artificial Sequence: Synthetic probe
aaaatatccttaatacttatatatccccaactttccaaatccccrccccc

SEQ ID NO: 3110 - DNA, 50 bp, Artificial Sequence
  Description of Artificial Sequence: Synthetic probe
ccataaactcatctaaaaaaaacrataataaaccctacaccttctatctc

SEQ ID NO: 3111 - DNA, 50 bp, Artificial Sequence
  Description of Artificial Sequence: Synthetic probe
cttaccaacacctaaaaccatccaaaactaaaaaatcccctccaaaccac

SEQ ID NO: 3112 - DNA, 50 bp, Artificial Sequence
  Description of Artificial Sequence: Synthetic probe
taaaattcctaacctccaaaccaatccctaatccctaacctaatattatc

SEQ ID NO: 3113 - DNA, 50 bp, Artificial Sequence
  Description of Artificial Sequence: Synthetic probe
aaactctctctatacaaatacaaaaaacactttacttaccatcattccrc

SEQ ID NO: 3114 - DNA, 50 bp, Artificial Sequence
  Description of Artificial Sequence: Synthetic probe
caaaactctctctatacaaatacaaaaaacactttacttaccatcattcc

SEQ ID NO: 3115 - DNA, 50 bp, Artificial Sequence
  Description of Artificial Sequence: Synthetic probe
aaattcctaacctccaaaccaatccctaatccctaacctaatattatcrc

SEQ ID NO: 3116 - DNA, 50 bp, Artificial Sequence
  Description of Artificial Sequence: Synthetic probe
acctccctaaacataacctttatcccctctatcactctatttaaccaatc

SEQ ID NO: 3117 - DNA, 50 bp, Artificial Sequence
  Description of Artificial Sequence: Synthetic probe
ccaaaaaatctcaataaaaaaaatatactatcctcacctctccaaaaaac

SEQ ID NO: 3118 - DNA, 50 bp, Artificial Sequence
  Description of Artificial Sequence: Synthetic probe
caaaaaaaccaaaaaataaaactaacatcaaatttacacactacacrtac

SEQ ID NO: 3119 - DNA, 50 bp, Artificial Sequence
  Description of Artificial Sequence: Synthetic probe
cccatcttatcaccctcctaaaactaccaacaaacttcaaattcttctcc

SEQ ID NO: 3120 - DNA, 50 bp, Artificial Sequence
  Description of Artificial Sequence: Synthetic probe
accttattaatctcatccaacctctcttcctactaaaccttcaacaatcc

SEQ ID NO: 3121 - DNA, 50 bp, Artificial Sequence
  Description of Artificial Sequence: Synthetic probe
aacaaaaataaactaaaaataactcrttcatcaaaatataaacaaccatc

SEQ ID NO: 3122 - DNA, 50 bp, Artificial Sequence
  Description of Artificial Sequence: Synthetic probe
atctttattcaaataatttacatacattatacaaataaataaaactaccc

SEQ ID NO: 3123 - DNA, 50 bp, Artificial Sequence
  Description of Artificial Sequence: Synthetic probe
ctaaatttccrcaaacctaataaaaattccaactctcrcatccctttacc

SEQ ID NO: 3124 - DNA, 50 bp, Artificial Sequence
  Description of Artificial Sequence: Synthetic probe
acraaaatacratacaaatcractaaacrattaaaacrcaaaatttacac

SEQ ID NO: 3125 - DNA, 50 bp, Artificial Sequence
  Description of Artificial Sequence: Synthetic probe
rcrctaattataataactcacactttacaatcccaacactttaacaaacc

SEQ ID NO: 3126 - DNA, 50 bp, Artificial Sequence
  Description of Artificial Sequence: Synthetic probe
actaattaaaaacaaacrtctataaaaccracaataactacrattccrac

SEQ ID NO: 3127 - DNA, 50 bp, Artificial Sequence
  Description of Artificial Sequence: Synthetic probe
tcractaattaaaaacaaacrtctataaaaccracaataactacrattcc

SEQ ID NO: 3128 - DNA, 50 bp, Artificial Sequence
  Description of Artificial Sequence: Synthetic probe
atcrtttcractaattaaaaacaaacrtctataaaaccracaataactac

SEQ ID NO: 3129 - DNA, 50 bp, Artificial Sequence
  Description of Artificial Sequence: Synthetic probe
aaccactcactttaaaaacraaaacttaatccraacccaaacractattc

SEQ ID NO: 3130 - DNA, 50 bp, Artificial Sequence
  Description of Artificial Sequence: Synthetic probe
atatcttaaccaaaaaacaaccactcactttaaaaacraaaacttaatcc

SEQ ID NO: 3131 - DNA, 50 bp, Artificial Sequence
  Description of Artificial Sequence: Synthetic probe
agatgtaataggtaatgttttggttaaaaggtagttatttattttggggg

SEQ ID NO: 3132 - DNA, 50 bp, Artificial Sequence
  Description of Artificial Sequence: Synthetic probe
aatacaataaataatatcttaaccaaaaaacaaccactcactttaaaaac

SEQ ID NO: 3133 - DNA, 50 bp, Artificial Sequence
  Description of Artificial Sequence: Synthetic probe
atacctctctctaccttttccaaaatacaaattctacaacttaaaaaaac

SEQ ID NO: 3134 - DNA, 50 bp, Artificial Sequence
  Description of Artificial Sequence: Synthetic probe
ataaccataataaaatttaaaatccraaccctccaactcatcaaaaccac

SEQ ID NO: 3135 - DNA, 50 bp, Artificial Sequence
  Description of Artificial Sequence: Synthetic probe
aaaactataacccaccccraaaatcataaccataataaaatttaaaatcc

SEQ ID NO: 3136 - DNA, 50 bp, Artificial Sequence
  Description of Artificial Sequence: Synthetic probe
taatcrttccaaaacaaaacaccaaaactcacraaaaacracatcattcc

SEQ ID NO: 3137 - DNA, 50 bp, Artificial Sequence
  Description of Artificial Sequence: Synthetic probe
actctccaacttccaatataatcrttccaaaacaaaacaccaaaactcac

SEQ ID NO: 3138 - DNA, 50 bp, Artificial Sequence
  Description of Artificial Sequence: Synthetic probe
atctctctaaataataacaaactcattatcctaatcttctttaaaaccac

SEQ ID NO: 3139 - DNA, 50 bp, Artificial Sequence
  Description of Artificial Sequence: Synthetic probe
ctatcatctcttttacaacaaatcaactatcrctacttacaaaatacaac

SEQ ID NO: 3140 - DNA, 50 bp, Artificial Sequence
  Description of Artificial Sequence: Synthetic probe
aggataatgagtttgttattatttagagagattaattttaaagtttgggt

SEQ ID NO: 3141 - DNA, 50 bp, Artificial Sequence
  Description of Artificial Sequence: Synthetic probe
aaataataaatttatcaccacccaaaaaaatcaaccccaaaacctaaatc

SEQ ID NO: 3142 - DNA, 50 bp, Artificial Sequence
  Description of Artificial Sequence: Synthetic probe
aaatcaattactatactttctatcatctcttttacaacaaatcaactatc

SEQ ID NO: 3143 - DNA, 50 bp, Artificial Sequence
  Description of Artificial Sequence: Synthetic probe
tatttagagagattaattttaaagtttgggtygttgtattttgtaagtag

SEQ ID NO: 3144 - DNA, 50 bp, Artificial Sequence
  Description of Artificial Sequence: Synthetic probe
acccaaaaaaatcaaccccaaaacctaaatcrttacatcctacaaataac

SEQ ID NO: 3145 - DNA, 50 bp, Artificial Sequence
  Description of Artificial Sequence: Synthetic probe
ataataactaattcccctaaccctactaaatcttaccaattaacaaaatc

SEQ ID NO: 3146 - DNA, 50 bp, Artificial Sequence
  Description of Artificial Sequence: Synthetic probe
raatcrcttaaacttctcaacacaaactacccracrctcttcttacatac

SEQ ID NO: 3147 - DNA, 50 bp, Artificial Sequence
  Description of Artificial Sequence: Synthetic probe
acaacaaactctactttaaaccrcttatcaaataccccaaacttttcatc

SEQ ID NO: 3148 - DNA, 50 bp, Artificial Sequence
  Description of Artificial Sequence: Synthetic probe
rcatacaaaaaaaacrccraacaacctatactaaaaaactcaaacractc

SEQ ID NO: 3149 - DNA, 50 bp, Artificial Sequence
  Description of Artificial Sequence: Synthetic probe
tactaaaaaactcaaacractcrataaaaaatttaaaacacctaacaaac

SEQ ID NO: 3150 - DNA, 50 bp, Artificial Sequence
  Description of Artificial Sequence: Synthetic probe
accccraaaaaaacracataaaaaaactcaacaacaaaataaaccrcctc

SEQ ID NO: 3151 - DNA, 50 bp, Artificial Sequence
  Description of Artificial Sequence: Synthetic probe
tctaaaccaaaaaaccaaaaatttaaataaacraaacttctcaaatcaac

SEQ ID NO: 3152 - DNA, 50 bp, Artificial Sequence
  Description of Artificial Sequence: Synthetic probe
atttgagttagagagttaaggatttgagtaaayggagttttttaagttag

SEQ ID NO: 3153 - DNA, 50 bp, Artificial Sequence
  Description of Artificial Sequence: Synthetic probe
taaaaaacractaaaaaaaacaaaacattaactccaatatccactaaatc

SEQ ID NO: 3154 - DNA, 50 bp, Artificial Sequence
  Description of Artificial Sequence: Synthetic probe
gaataggttgtaagtagaagttgggaaatataatttgtgggaaaaagtaa

SEQ ID NO: 3155 - DNA, 50 bp, Artificial Sequence
  Description of Artificial Sequence: Synthetic probe
ttggaggaygattggagaaaatagagtattagttttagtatttattaaat

SEQ ID NO: 3156 - DNA, 50 bp, Artificial Sequence
  Description of Artificial Sequence: Synthetic probe
cccaaacttataccttaaataaccccctaatacaattacactcccttaac

SEQ ID NO: 3157 - DNA, 50 bp, Artificial Sequence
  Description of Artificial Sequence: Synthetic probe
tttatagtaattttgttggtatttaataggttttggtttagtttagtagt

SEQ ID NO: 3158 - DNA, 50 bp, Artificial Sequence
  Description of Artificial Sequence: Synthetic probe
ccacaacaaccctactaacatccaacaaactctaacccaacttaataacc

SEQ ID NO: 3159 - DNA, 50 bp, Artificial Sequence
  Description of Artificial Sequence: Synthetic probe
aaataaaactcctcraaactctaccraaattaatccctttccccctaaac

SEQ ID NO: 3160 - DNA, 50 bp, Artificial Sequence
  Description of Artificial Sequence: Synthetic probe
ctcaaacccatcccttacctcctataacaactctaattttctaaaaaacc

SEQ ID NO: 3161 - DNA, 50 bp, Artificial Sequence
  Description of Artificial Sequence: Synthetic probe
acrctataatcrttctataccaataaaaccaaaaaacaaaaactactccc

SEQ ID NO: 3162 - DNA, 50 bp, Artificial Sequence
  Description of Artificial Sequence: Synthetic probe
aaataaccraataaaaccaaactctatacctcratctatacrctataatc

SEQ ID NO: 3163 - DNA, 50 bp, Artificial Sequence
  Description of Artificial Sequence: Synthetic probe
aaatcrataaaataaccraataaaaccaaactctatacctcratctatac

SEQ ID NO: 3164 - DNA, 50 bp, Artificial Sequence
  Description of Artificial Sequence: Synthetic probe
taggygtaagtttgagttttgtgattataagaaggtaggagatattgttt

SEQ ID NO: 3165 - DNA, 50 bp, Artificial Sequence
  Description of Artificial Sequence: Synthetic probe
aaacrtaaatctaaatcctataatcacaaaaaaacaaaaaacattatccc

SEQ ID NO: 3166 - DNA, 50 bp, Artificial Sequence
  Description of Artificial Sequence: Synthetic probe
acctctactaaaccacaatccaaaaacctaaattctaaacactatatccc

SEQ ID NO: 3167 - DNA, 50 bp, Artificial Sequence
  Description of Artificial Sequence: Synthetic probe
ctctaaaaaaaccataaactctcaattacatccaaacaataaaaacttcc

SEQ ID NO: 3168 - DNA, 50 bp, Artificial Sequence
  Description of Artificial Sequence: Synthetic probe
cacaaacatcraatcttacctataaaaatacaataaaaatatcccaaaac

SEQ ID NO: 3169 - DNA, 50 bp, Artificial Sequence
  Description of Artificial Sequence: Synthetic probe
caaaaaccacaacccacattacttaaaaactcraacrtacrcaaaactcc

SEQ ID NO: 3170 - DNA, 50 bp, Artificial Sequence
  Description of Artificial Sequence: Synthetic probe
ataaaaattataatttatattatttgagggttygggygtgygtaaagttt

SEQ ID NO: 3171 - DNA, 50 bp, Artificial Sequence
  Description of Artificial Sequence: Synthetic probe
aaaaacrttatataaaaataaaaccccaaccracaaatcctaatactcrc

SEQ ID NO: 3172 - DNA, 50 bp, Artificial Sequence
  Description of Artificial Sequence: Synthetic probe
ctaaaactttttcaataataaacraacaaaactccrcrcrcccaaataac

SEQ ID NO: 3173 - DNA, 50 bp, Artificial Sequence
  Description of Artificial Sequence: Synthetic probe
aataacrcraacactaaaatctatcrattaaaatcctacttttacataac

SEQ ID NO: 3174 - DNA, 50 bp, Artificial Sequence
  Description of Artificial Sequence: Synthetic probe
rtaacrttatttcattacacracttctcracattccacaaatttccctcc

SEQ ID NO: 3175 - DNA, 50 bp, Artificial Sequence
  Description of Artificial Sequence: Synthetic probe
aatccrctaaatccttattacctattaaacccctaatacraatcaatccc

SEQ ID NO: 3176 - DNA, 50 bp, Artificial Sequence
  Description of Artificial Sequence: Synthetic probe
cataaaacaaaaacccraaaaaaacaatatacccrtcaaaaatctctaac

SEQ ID NO: 3177 - DNA, 50 bp, Artificial Sequence
  Description of Artificial Sequence: Synthetic probe
aatcatacaaaaacttatattaataaaaaacctaaatcraaatccctacc

SEQ ID NO: 3178 - DNA, 50 bp, Artificial Sequence
  Description of Artificial Sequence: Synthetic probe
ccaaaacaaatttaatcttactaaactcaataaacaaatccctcactatc

SEQ ID NO: 3179 - DNA, 50 bp, Artificial Sequence
  Description of Artificial Sequence: Synthetic probe
aaccraaatactttataaattaatccacrcccrctacatccttaccaacc

SEQ ID NO: 3180 - DNA, 50 bp, Artificial Sequence
  Description of Artificial Sequence: Synthetic probe
aaaaataactatatacaaacacrcaaattaaattaacaacctaaatctac

SEQ ID NO: 3181 - DNA, 50 bp, Artificial Sequence
  Description of Artificial Sequence: Synthetic probe
atcacrtctcccaccractctatctccacttaattacaataataaactac

SEQ ID NO: 3182 - DNA, 50 bp, Artificial Sequence
  Description of Artificial Sequence: Synthetic probe
tagttgattggaaaattatatttatttttggttgatgggagggttaaaag

SEQ ID NO: 3183 - DNA, 50 bp, Artificial Sequence
  Description of Artificial Sequence: Synthetic probe
ttgttttttggggtttagttggttaaggagtgtattattgtaattaagtt

SEQ ID NO: 3184 - DNA, 50 bp, Artificial Sequence
  Description of Artificial Sequence: Synthetic probe
taccctttaaaatttaattaattaaaaaatacaccactataattaaaccc

SEQ ID NO: 3185 - DNA, 50 bp, Artificial Sequence
  Description of Artificial Sequence: Synthetic probe
taatatcaatattaactttaactaactaacataactacccacaaaatatc

SEQ ID NO: 3186 - DNA, 50 bp, Artificial Sequence
  Description of Artificial Sequence: Synthetic probe
ataattccaaaaaaaaacaacrttacctatcacctaataaattaaaacac

SEQ ID NO: 3187 - DNA, 50 bp, Artificial Sequence
  Description of Artificial Sequence: Synthetic probe
ttgatattaatattgattttggttggttggtatgattatttatagggtat

SEQ ID NO: 3188 - DNA, 50 bp, Artificial Sequence
  Description of Artificial Sequence: Synthetic probe
tcaaaacrataaacataataaaatcactactccataaaacttatttatac

SEQ ID NO: 3189 - DNA, 50 bp, Artificial Sequence
  Description of Artificial Sequence: Synthetic probe
cacaaacrcacaaataaactttataaaacaataacttcattatattcacc

SEQ ID NO: 3190 - DNA, 50 bp, Artificial Sequence
  Description of Artificial Sequence: Synthetic probe
tattyggtaattatttagtgtttattttgggttaggggttggatttaaag

SEQ ID NO: 3191 - DNA, 50 bp, Artificial Sequence
  Description of Artificial Sequence: Synthetic probe
tatttaggaaataggtayggtagggttgagatagaagttttgtttgtttt

SEQ ID NO: 3192 - DNA, 50 bp, Artificial Sequence
  Description of Artificial Sequence: Synthetic probe
acccaaaaaacaaacacrataaaactaaaacaaaaatcctacttatttcc

SEQ ID NO: 3193 - DNA, 50 bp, Artificial Sequence
  Description of Artificial Sequence: Synthetic probe
tactaaacaacracaaaaaacraaaaatttaaacrttctaaacccrcccc

SEQ ID NO: 3194 - DNA, 50 bp, Artificial Sequence
  Description of Artificial Sequence: Synthetic probe
gtttttttaatygttgttgattggagaggttyggatttagtttagagatt

SEQ ID NO: 3195 - DNA, 50 bp, Artificial Sequence
  Description of Artificial Sequence: Synthetic probe
ccctcctaaccrctattaattaaaaaaacccraatccaacctaaaaatcc

SEQ ID NO: 3196 - DNA, 50 bp, Artificial Sequence
  Description of Artificial Sequence: Synthetic probe
aatctctaaactaaatccraacctctccaatcaacaacrattaaaaaaac

SEQ ID NO: 3197 - DNA, 50 bp, Artificial Sequence
  Description of Artificial Sequence: Synthetic probe
ctataaaacraatcrtacacrtcttatatctctacctctaccaaccacrc

SEQ ID NO: 3198 - DNA, 50 bp, Artificial Sequence
  Description of Artificial Sequence: Synthetic probe
aaaatacaaattataaaaaactccacrcrccccaccctcattcctatcac

SEQ ID NO: 3199 - DNA, 50 bp, Artificial Sequence
  Description of Artificial Sequence: Synthetic probe
ataaattctcraatatttaactaaaatacaaattataaaaaactccacrc

SEQ ID NO: 3200 - DNA, 50 bp, Artificial Sequence
  Description of Artificial Sequence: Synthetic probe
ggtgaattttygggtatttaattaaagtatagattgtgggaaattttayg

SEQ ID NO: 3201 - DNA, 50 bp, Artificial Sequence
  Description of Artificial Sequence: Synthetic probe
actttaattaaatacccraaaattcacctcctatatccacaactctccac

SEQ ID NO: 3202 - DNA, 50 bp, Artificial Sequence
  Description of Artificial Sequence: Synthetic probe
ttttgtttygtagttttgtagtagaagtatttagtgttttgtattttgyg

SEQ ID NO: 3203 - DNA, 50 bp, Artificial Sequence
  Description of Artificial Sequence: Synthetic probe
cctaccccrcaaccctataacaaaaatacttaatactttacattctacrc

SEQ ID NO: 3204 - DNA, 50 bp, Artificial Sequence
  Description of Artificial Sequence: Synthetic probe
cctataacaaaaatacttaatactttacattctacrcrccaccctacccc

SEQ ID NO: 3205 - DNA, 50 bp, Artificial Sequence
  Description of Artificial Sequence: Synthetic probe
aactaatttacccaaaactaaatctaaaacacctaaaacattataaatac

SEQ ID NO: 3206 - DNA, 50 bp, Artificial Sequence
  Description of Artificial Sequence: Synthetic probe
ataatctcataccctatctaattccatttaaaaaatacrcattcctcccc

SEQ ID NO: 3207 - DNA, 50 bp, Artificial Sequence
  Description of Artificial Sequence: Synthetic probe
tcttcaaattatataatctcataccctatctaattccatttaaaaaatac

SEQ ID NO: 3208 - DNA, 50 bp, Artificial Sequence
  Description of Artificial Sequence: Synthetic probe
tctcaattattaaatttacaatttaatttaactaaaatctctcccaatac

SEQ ID NO: 3209 - DNA, 50 bp, Artificial Sequence
  Description of Artificial Sequence: Synthetic probe
acacatacrctacactaaacacttaaatatctctaactcacrccctactc

SEQ ID NO: 3210 - DNA, 50 bp, Artificial Sequence
  Description of Artificial Sequence: Synthetic probe
ctttaaaaaacacatacrctacactaaacacttaaatatctctaactcac

SEQ ID NO: 3211 - DNA, 50 bp, Artificial Sequence
  Description of Artificial Sequence: Synthetic probe
ttaaatttacaatttaatttaactaaaatctctcccaatacraacaaaac

SEQ ID NO: 3212 - DNA, 50 bp, Artificial Sequence
  Description of Artificial Sequence: Synthetic probe
caatataaaccaatctataaataaccatccccactttaaaaaacacatac

SEQ ID NO: 3213 - DNA, 50 bp, Artificial Sequence
  Description of Artificial Sequence: Synthetic probe
cccaatacraacaaaacrtaaatcaaaaatacctaaatatttaatacaac

SEQ ID NO: 3214 - DNA, 50 bp, Artificial Sequence
  Description of Artificial Sequence: Synthetic probe
aatctataaccaattactttaaattaaaacaccccaaatttaaataaaac

SEQ ID NO: 3215 - DNA, 50 bp, Artificial Sequence
  Description of Artificial Sequence: Synthetic probe
ttaaggagtagaggtatttgaaatttatttttgaagttatttggatgttt

SEQ ID NO: 3216 - DNA, 50 bp, Artificial Sequence
  Description of Artificial Sequence: Synthetic probe
caaaaaacaaaaatacctaaaacccacccttaaaaccatctaaatactcc

SEQ ID NO: 3217 - DNA, 50 bp, Artificial Sequence
  Description of Artificial Sequence: Synthetic probe
tagtttgtggttagttattttgggttagaatattttagatttgaatgaag

SEQ ID NO: 3218 - DNA, 50 bp, Artificial Sequence
  Description of Artificial Sequence: Synthetic probe
aataaattcatatacaaaaataaatatctcatctatatttatctaattcc

SEQ ID NO: 3219 - DNA, 50 bp, Artificial Sequence
  Description of Artificial Sequence: Synthetic probe
tccctacaaaatctcacactctcataaccaataaatatacaaaaataccc

SEQ ID NO: 3220 - DNA, 50 bp, Artificial Sequence
  Description of Artificial Sequence: Synthetic probe
taatacaaatatctatatatccatcaaccaatttaaaaataaaacatacc

SEQ ID NO: 3221 - DNA, 50 bp, Artificial Sequence
  Description of Artificial Sequence: Synthetic probe
acaaatatctatatatccatcaaccaatttaaaaataaaacataccraac

SEQ ID NO: 3222 - DNA, 50 bp, Artificial Sequence
  Description of Artificial Sequence: Synthetic probe
aaatatctatatatccatcaaccaatttaaaaataaaacataccraacrc

SEQ ID NO: 3223 - DNA, 50 bp, Artificial Sequence
  Description of Artificial Sequence: Synthetic probe
aaatatttatataccaacactacaactcactctaaaactaaataaaaaac

SEQ ID NO: 3224 - DNA, 50 bp, Artificial Sequence
  Description of Artificial Sequence: Synthetic probe
caaaaacactttcacaactaaaaaaacatacaaactcatactaactcacc

SEQ ID NO: 3225 - DNA, 50 bp, Artificial Sequence
  Description of Artificial Sequence: Synthetic probe
tcacaatttcaacraataaaaccrtatatcattccatatatataaataac

SEQ ID NO: 3226 - DNA, 50 bp, Artificial Sequence
  Description of Artificial Sequence: Synthetic probe
acacaaatacctcaacacactactctccttctaaaatattaacaaactcc

SEQ ID NO: 3227 - DNA, 50 bp, Artificial Sequence
  Description of Artificial Sequence: Synthetic probe
cttctaaaatattaacaaactccrttacttatatacataaaataacacac

SEQ ID NO: 3228 - DNA, 50 bp, Artificial Sequence
  Description of Artificial Sequence: Synthetic probe
aaatataaacataattatatctacatatcacaatttcaacraataaaacc

SEQ ID NO: 3229 - DNA, 50 bp, Artificial Sequence
  Description of Artificial Sequence: Synthetic probe
attaacaaactccrttacttatatacataaaataacacacratcttatcc

SEQ ID NO: 3230 - DNA, 50 bp, Artificial Sequence
  Description of Artificial Sequence: Synthetic probe
ttatagggattagtayggttattgggtayggatgatataaatttaagaag

SEQ ID NO: 3231 - DNA, 50 bp, Artificial Sequence
  Description of Artificial Sequence: Synthetic probe
tacaaaaattaacacraccactaaacacraataacacaaattcaaaaaac

SEQ ID NO: 3232 - DNA, 50 bp, Artificial Sequence
  Description of Artificial Sequence: Synthetic probe
acccttttttttttccccaatataaaacrcttcttaaatttatatcatcc

SEQ ID NO: 3233 - DNA, 50 bp, Artificial Sequence
  Description of Artificial Sequence: Synthetic probe
atatatattgaaatttygaaggttatagggattagtayggttattgggta

SEQ ID NO: 3234 - DNA, 50 bp, Artificial Sequence
  Description of Artificial Sequence: Synthetic probe
catttctacaacacatatactaaaatttcraaaattacaaaaattaacac

SEQ ID NO: 3235 - DNA, 50 bp, Artificial Sequence
  Description of Artificial Sequence: Synthetic probe
tccccaatataaaacrcttcttaaatttatatcatccrtacccaataacc

SEQ ID NO: 3236 - DNA, 50 bp, Artificial Sequence
  Description of Artificial Sequence: Synthetic probe
ttgaatttgtgttattygtgtttagtggtygtgttaatttttgtaatttt

SEQ ID NO: 3237 - DNA, 50 bp, Artificial Sequence
  Description of Artificial Sequence: Synthetic probe
taaatttatatcatccrtacccaataaccrtactaatccctataaccttc

SEQ ID NO: 3238 - DNA, 50 bp, Artificial Sequence
  Description of Artificial Sequence: Synthetic probe
atacaaaaaaaacaataacaaaaaaacctcatcractatcaaaaccraac

SEQ ID NO: 3239 - DNA, 50 bp, Artificial Sequence
  Description of Artificial Sequence: Synthetic probe
aataatacaaaaaaaacaataacaaaaaaacctcatcractatcaaaacc

SEQ ID NO: 3240 - DNA, 50 bp, Artificial Sequence
  Description of Artificial Sequence: Synthetic probe
caaactatatacaataccctaaacctaaaaaatacctaccrctccctacc

SEQ ID NO: 3241 - DNA, 50 bp, Artificial Sequence
  Description of Artificial Sequence: Synthetic probe
aaaactaacratataatacaaatcatcaaaaaactcttaaacaatatccc

SEQ ID NO: 3242 - DNA, 50 bp, Artificial Sequence
  Description of Artificial Sequence: Synthetic probe
acaatacttatctcctcaaataaactttaaaaacaaccttactaaaaatc

SEQ ID NO: 3243 - DNA, 50 bp, Artificial Sequence
  Description of Artificial Sequence: Synthetic probe
aaatccccaactataataaccacctaccaaaaataatactccatcactac

SEQ ID NO: 3244 - DNA, 50 bp, Artificial Sequence
  Description of Artificial Sequence: Synthetic probe
aaactaaaaaatcccatcaatcttcrcttttctacraaaataaaaaacac

SEQ ID NO: 3245 - DNA, 50 bp, Artificial Sequence
  Description of Artificial Sequence: Synthetic probe
acaaccaaaacaaaaaactcacttttaataaccacrtatcttccaccctc

SEQ ID NO: 3246 - DNA, 50 bp, Artificial Sequence
  Description of Artificial Sequence: Synthetic probe
caaaaaactcacttttaataaccacrtatcttccaccctcrtaaaaaaac

SEQ ID NO: 3247 - DNA, 50 bp, Artificial Sequence
  Description of Artificial Sequence: Synthetic probe
aaaaaaacraaaactaataaaacttcccaatttccttactaaaattaccc

SEQ ID NO: 3248 - DNA, 50 bp, Artificial Sequence
  Description of Artificial Sequence: Synthetic probe
ttagtttttttattgaggttgttygtaaggagttggagaatttggatttt

SEQ ID NO: 3249 - DNA, 50 bp, Artificial Sequence
  Description of Artificial Sequence: Synthetic probe
caatttccttactaaaattacccrcaaaaaactaaaaaatctaaactccc

SEQ ID NO: 3250 - DNA, 50 bp, Artificial Sequence
  Description of Artificial Sequence: Synthetic probe
atccaatccattaatctcaaaatcactaacctctaccataaaaaacaaac

SEQ ID NO: 3251 - DNA, 50 bp, Artificial Sequence
  Description of Artificial Sequence: Synthetic probe
agtttagtttattaattttaaagttattggtttttattatggaaggtagg

SEQ ID NO: 3252 - DNA, 50 bp, Artificial Sequence
  Description of Artificial Sequence: Synthetic probe
rcaatacaaatcccccaacaatacatccaactccttaattcraacactac

SEQ ID NO: 3253 - DNA, 50 bp, Artificial Sequence
  Description of Artificial Sequence: Synthetic probe
ccraaccaaaaaactaaatacattactaaaaaacctacactacraaatcc

SEQ ID NO: 3254 - DNA, 50 bp, Artificial Sequence
  Description of Artificial Sequence: Synthetic probe
tttttttaaacatcttacaatacatataacctctaacttttcctcacccc

SEQ ID NO: 3255 - DNA, 50 bp, Artificial Sequence
  Description of Artificial Sequence: Synthetic probe
caacttaaaaatacttccaacaaacccctcctcttcctactctctatctc

SEQ ID NO: 3256 - DNA, 50 bp, Artificial Sequence
  Description of Artificial Sequence: Synthetic probe
aaaccaaaaaacrctactaatataccaactacaataccaaatactaacac

SEQ ID NO: 3257 - DNA, 50 bp, Artificial Sequence
  Description of Artificial Sequence: Synthetic probe
aatataccaactacaataccaaatactaacacraacaactatcttaaccc

SEQ ID NO: 3258 - DNA, 50 bp, Artificial Sequence
  Description of Artificial Sequence: Synthetic probe
aatactaacacraacaactatcttaacccraatattaaaccttacctccc

SEQ ID NO: 3259 - DNA, 50 bp, Artificial Sequence
  Description of Artificial Sequence: Synthetic probe
taccccaaaaacttataaaaaataacrcraccttaaataaccataatccc

SEQ ID NO: 3260 - DNA, 50 bp, Artificial Sequence
  Description of Artificial Sequence: Synthetic probe
cttacctaccattctaaattcrtaccccaaaaacttataaaaaataacrc

SEQ ID NO: 3261 - DNA, 50 bp, Artificial Sequence
  Description of Artificial Sequence: Synthetic probe
rtcctactaactcttaccaatactacccraaactataactactcaaaacc

SEQ ID NO: 3262 - DNA, 50 bp, Artificial Sequence
  Description of Artificial Sequence: Synthetic probe
ttttatttgttattttggattygtattttaaggatttgtggggagtaayg

SEQ ID NO: 3263 - DNA, 50 bp, Artificial Sequence
  Description of Artificial Sequence: Synthetic probe
gggattatggttatttaaggtygygttattttttataagtttttggggta

SEQ ID NO: 3264 - DNA, 50 bp, Artificial Sequence
  Description of Artificial Sequence: Synthetic probe
aaactataactactcaaaaccrcrttactccccacaaatccttaaaatac

SEQ ID NO: 3265 - DNA, 50 bp, Artificial Sequence
  Description of Artificial Sequence: Synthetic probe
caaaaactacatcttctaaaaattcatctatcttaatccacaaaccatac

SEQ ID NO: 3266 - DNA, 50 bp, Artificial Sequence
  Description of Artificial Sequence: Synthetic probe
ttctaaaaattcatctatcttaatccacaaaccatacraaatacctctcc

SEQ ID NO: 3267 - DNA, 50 bp, Artificial Sequence
  Description of Artificial Sequence: Synthetic probe
aacacaaaaattcraacacaaaattccatcaaaaaatatctacaataaac

SEQ ID NO: 3268 - DNA, 50 bp, Artificial Sequence
  Description of Artificial Sequence: Synthetic probe
tttttgggggtttatttattttgatttataagttatgygaggtgtttttt

SEQ ID NO: 3269 - DNA, 50 bp, Artificial Sequence
  Description of Artificial Sequence: Synthetic probe
aaccctccctttatccccaccacattctataaaattaaacacaaaaattc

SEQ ID NO: 3270 - DNA, 50 bp, Artificial Sequence
  Description of Artificial Sequence: Synthetic probe
cacctacctctaaataaatacacaccactcccaaatatatctctacccac

SEQ ID NO: 3271 - DNA, 50 bp, Artificial Sequence
  Description of Artificial Sequence: Synthetic probe
aattcrcaactataaattcrtataaaaataacrtctactaccccaatttc

SEQ ID NO: 3272 - DNA, 50 bp, Artificial Sequence
  Description of Artificial Sequence: Synthetic probe
ggattygtagttatgaattygtgtgaagatggygtttattgttttaattt

SEQ ID NO: 3273 - DNA, 50 bp, Artificial Sequence
  Description of Artificial Sequence: Synthetic probe
tataccaacaaaaaaaaccraaattaaaacaataaacrccatcttcacac

SEQ ID NO: 3274 - DNA, 50 bp, Artificial Sequence
  Description of Artificial Sequence: Synthetic probe
raattcataactacraatccatctcccttaacctctccaccttcataatc

SEQ ID NO: 3275 - DNA, 50 bp, Artificial Sequence
  Description of Artificial Sequence: Synthetic probe
taaaaaaaacatatatacaactttattcacaaaccaactataatcaatac

SEQ ID NO: 3276 - DNA, 50 bp, Artificial Sequence
  Description of Artificial Sequence: Synthetic probe
aaaacatatatacaactttattcacaaaccaactataatcaatacrttac

SEQ ID NO: 3277 - DNA, 50 bp, Artificial Sequence
  Description of Artificial Sequence: Synthetic probe
attcatcaataaaaaccaacractatacaataacattattcactactttc

SEQ ID NO: 3278 - DNA, 50 bp, Artificial Sequence
  Description of Artificial Sequence: Synthetic probe
raacttccaatactaactttcccttatccaccttatacccaacaaataac

SEQ ID NO: 3279 - DNA, 50 bp, Artificial Sequence
  Description of Artificial Sequence: Synthetic probe
ccttatacccaacaaataacraaaacaataaacaataccactacacaatc

SEQ ID NO: 3280 - DNA, 50 bp, Artificial Sequence
  Description of Artificial Sequence: Synthetic probe
ctcccctcaccrtattaattccctttccaaattcatcaataaaaaccaac

SEQ ID NO: 3281 - DNA, 50 bp, Artificial Sequence
  Description of Artificial Sequence: Synthetic probe
attttatatttagtaggtggygaaagtagtgaataatgttattgtatagt

SEQ ID NO: 3282 - DNA, 50 bp, Artificial Sequence
  Description of Artificial Sequence: Synthetic probe
aaaaaaaaacaatacaaatacaaaaaaacatataaaatccccataactcc

SEQ ID NO: 3283 - DNA, 50 bp, Artificial Sequence
  Description of Artificial Sequence: Synthetic probe
cccataactccraatactaacctctaccctctttacaaataaataaactc

SEQ ID NO: 3284 - DNA, 50 bp, Artificial Sequence
  Description of Artificial Sequence: Synthetic probe
aacatataaatccacrtaccaaccaatatcraaacacaacraccaaaaac

SEQ ID NO: 3285 - DNA, 50 bp, Artificial Sequence
  Description of Artificial Sequence: Synthetic probe
cataactccraatactaacctctaccctctttacaaataaataaactcrc

SEQ ID NO: 3286 - DNA, 50 bp, Artificial Sequence
  Description of Artificial Sequence: Synthetic probe
aaaatataaaaacatataaatccacrtaccaaccaatatcraaacacaac

SEQ ID NO: 3287 - DNA, 50 bp, Artificial Sequence
  Description of Artificial Sequence: Synthetic probe
aatactaacctctaccctctttacaaataaataaactcrcrcttctaacc

SEQ ID NO: 3288 - DNA, 50 bp, Artificial Sequence
  Description of Artificial Sequence: Synthetic probe
aataaccacaaaaatataaaaacatataaatccacrtaccaaccaatatc

SEQ ID NO: 3289 - DNA, 50 bp, Artificial Sequence
  Description of Artificial Sequence: Synthetic probe
aataaataaactcrcrcttctaaccrctatactccracactaactaacac

SEQ ID NO: 3290 - DNA, 50 bp, Artificial Sequence
  Description of Artificial Sequence: Synthetic probe
ataaaaaaaccaatccccacctctaaaaaatacccaacctaaaaatcccc

SEQ ID NO: 3291 - DNA, 50 bp, Artificial Sequence
  Description of Artificial Sequence: Synthetic probe
ttataagggtttttggtgtagtatttggtgaggagattaatttagttttt

SEQ ID NO: 3292 - DNA, 50 bp, Artificial Sequence
  Description of Artificial Sequence: Synthetic probe
ccaacctaaacaactatataaaaaacataactaaccttcrcaacaccttc

SEQ ID NO: 3293 - DNA, 50 bp, Artificial Sequence
  Description of Artificial Sequence: Synthetic probe
taaaaacctataaaaataacaacratcttatcttcttctatcaaatttac

SEQ ID NO: 3294 - DNA, 50 bp, Artificial Sequence
  Description of Artificial Sequence: Synthetic probe
tatcaaaaaacccaacctaaacaactatataaaaaacataactaaccttc

SEQ ID NO: 3295 - DNA, 50 bp, Artificial Sequence
  Description of Artificial Sequence: Synthetic probe
aaaaataacaacratcttatcttcttctatcaaatttacraaaatattac

SEQ ID NO: 3296 - DNA, 50 bp, Artificial Sequence
  Description of Artificial Sequence: Synthetic probe
taactttcraattctaattatctccaaaatcatccraccaatctcrcacc

SEQ ID NO: 3297 - DNA, 50 bp, Artificial Sequence
  Description of Artificial Sequence: Synthetic probe
craaaaacraccaacctaaaaaactactacraaaatccrcttcrtctttc

SEQ ID NO: 3298 - DNA, 50 bp, Artificial Sequence
  Description of Artificial Sequence: Synthetic probe
aaacaccracrtattaaatttccracrttccraaaaactaaactcttatc

SEQ ID NO: 3299 - DNA, 50 bp, Artificial Sequence
  Description of Artificial Sequence: Synthetic probe
ccaatctcaaaacraaacccacaaaacaaaacaccracataaccaaaacc

SEQ ID NO: 3300 - DNA, 50 bp, Artificial Sequence
  Description of Artificial Sequence: Synthetic probe
aaaacaaaaaaacacacaactcrcaaaaactcaactaaataaattctctc

SEQ ID NO: 3301 - DNA, 50 bp, Artificial Sequence
  Description of Artificial Sequence: Synthetic probe
aaagatagaaaagtatataattygtaagggtttagttgggtgagtttttt

SEQ ID NO: 3302 - DNA, 50 bp, Artificial Sequence
  Description of Artificial Sequence: Synthetic probe
cacacaactcrcaaaaactcaactaaataaattctctcrcttataaaacc

SEQ ID NO: 3303 - DNA, 50 bp, Artificial Sequence
  Description of Artificial Sequence: Synthetic probe
gtatataattygtaagggtttagttgggtgagttttttygtttgtgaagt

SEQ ID NO: 3304 - DNA, 50 bp, Artificial Sequence
  Description of Artificial Sequence: Synthetic probe
ccccaaataaataataccctaaaaaaattattatatctaaaacaaacatc

SEQ ID NO: 3305 - DNA, 50 bp, Artificial Sequence
  Description of Artificial Sequence: Synthetic probe
cracacttaaatcaaaaaacaaaacatccccccaaaactaaaaaaccctc

SEQ ID NO: 3306 - DNA, 50 bp, Artificial Sequence
  Description of Artificial Sequence: Synthetic probe
ttaacaaatacaaaacaaatactaaattccacactacacccaccaccccc

SEQ ID NO: 3307 - DNA, 50 bp, Artificial Sequence
  Description of Artificial Sequence: Synthetic probe
ccctcctttcraaaccccatcaaaaacaaataaactctaaacactactcc

SEQ ID NO: 3308 - DNA, 50 bp, Artificial Sequence
  Description of Artificial Sequence: Synthetic probe
ctataaaataatctacaaaacrcraaccccccaacccatcttaactattc

SEQ ID NO: 3309 - DNA, 50 bp, Artificial Sequence
  Description of Artificial Sequence: Synthetic probe
caaaacrcraaccccccaacccatcttaactattcrataaaactataacc

SEQ ID NO: 3310 - DNA, 50 bp, Artificial Sequence
  Description of Artificial Sequence: Synthetic probe
aaaaataaactataaaacaaaacctcacttaataccactctatacraccc

SEQ ID NO: 3311 - DNA, 50 bp, Artificial Sequence
  Description of Artificial Sequence: Synthetic probe
taataccactctatacracccrattcttacaatttctccaacataaacac

SEQ ID NO: 3312 - DNA, 50 bp, Artificial Sequence
  Description of Artificial Sequence: Synthetic probe
ttaggaatttaataagattgagttttygttgattttygagtgtaattagg

SEQ ID NO: 3313 - DNA, 50 bp, Artificial Sequence
  Description of Artificial Sequence: Synthetic probe
caaaaatttaacaaaattaaacctccrctaattttcraatataaccaaac

SEQ ID NO: 3314 - DNA, 50 bp, Artificial Sequence
  Description of Artificial Sequence: Synthetic probe
ataaacrattactccaaaaatttaacaaaattaaacctccrctaattttc

SEQ ID NO: 3315 - DNA, 50 bp, Artificial Sequence
  Description of Artificial Sequence: Synthetic probe
gatgggygattgttttaggaatttaataagattgagttttygttgatttt

SEQ ID NO: 3316 - DNA, 50 bp, Artificial Sequence
  Description of Artificial Sequence: Synthetic probe
tcttacaatttctccaacataaacacrcctaattacactcraaaatcaac

SEQ ID NO: 3317 - DNA, 50 bp, Artificial Sequence
  Description of Artificial Sequence: Synthetic probe
ygtattttaggatgggygattgttttaggaatttaataagattgagtttt

SEQ ID NO: 3318 - DNA, 50 bp, Artificial Sequence
  Description of Artificial Sequence: Synthetic probe
rcaccctaaaataaacrattactccaaaaatttaacaaaattaaacctcc

SEQ ID NO: 3319 - DNA, 50 bp, Artificial Sequence
  Description of Artificial Sequence: Synthetic probe
acactcraaaatcaacraaaactcaatcttattaaattcctaaaacaatc

SEQ ID NO: 3320 - DNA, 50 bp, Artificial Sequence
  Description of Artificial Sequence: Synthetic probe
aacacraaatacaaaaacatcatccctaatttacataaacctaaacacac

SEQ ID NO: 3321 - DNA, 50 bp, Artificial Sequence
  Description of Artificial Sequence: Synthetic probe
aaacaaaaaacacrcaccttatcataccaacaccraatactaaactaacc

SEQ ID NO: 3322 - DNA, 50 bp, Artificial Sequence
  Description of Artificial Sequence: Synthetic probe
ttttagtattgtaygtgtgtggaygattgttttagttttaattgtttgtg

SEQ ID NO: 3323 - DNA, 50 bp, Artificial Sequence
  Description of Artificial Sequence: Synthetic probe
aataaaaaaacccaaaccratcataaaattaaactaacctctacctcctc

SEQ ID NO: 3324 - DNA, 50 bp, Artificial Sequence
  Description of Artificial Sequence: Synthetic probe
acaaacaattaaaactaaaacaatcrtccacacacrtacaatactaaaac

SEQ ID NO: 3325 - DNA, 50 bp, Artificial Sequence
  Description of Artificial Sequence: Synthetic probe
tactcaataacctcataaccaaactctaaacaaataaaaataattttccc

SEQ ID NO: 3326 - DNA, 50 bp, Artificial Sequence
  Description of Artificial Sequence: Synthetic probe
aacaaaaaaaattcctatcctaaccraaccaaaatatcaataacaaaaac

SEQ ID NO: 3327 - DNA, 50 bp, Artificial Sequence
  Description of Artificial Sequence: Synthetic probe
aaaaaccaccraaaaaaataaatacaactaaaacraaccccaattaaacc

SEQ ID NO: 3328 - DNA, 50 bp, Artificial Sequence
  Description of Artificial Sequence: Synthetic probe
aacaaacttataaacraaacrcacrtcrcaataaaaacaacrataaaacc

SEQ ID NO: 3329 - DNA, 50 bp, Artificial Sequence
  Description of Artificial Sequence: Synthetic probe
caacrctacraaacataaaccaactccraacaaaaaaacrattctacrac

SEQ ID NO: 3330 - DNA, 50 bp, Artificial Sequence
  Description of Artificial Sequence: Synthetic probe
tatatatccatcatctaacttcaattcataaacratctcrattcataaac

SEQ ID NO: 3331 - DNA, 50 bp, Artificial Sequence
  Description of Artificial Sequence: Synthetic probe
aaactttcatatatatatccatcatctaacttcaattcataaacratctc

SEQ ID NO: 3332 - DNA, 50 bp, Artificial Sequence
  Description of Artificial Sequence: Synthetic probe
aaataattaataaataatatataaacataaacccaaaccrtctataaacc

SEQ ID NO: 3333 - DNA, 50 bp, Artificial Sequence
  Description of Artificial Sequence: Synthetic probe
tcaattatccccataccacaatatactatatctatcccctattaataaac

SEQ ID NO: 3334 - DNA, 50 bp, Artificial Sequence
  Description of Artificial Sequence: Synthetic probe
tttactttaacattcactattaccaaaaaaaaatatttaaaaactcccac

SEQ ID NO: 3335 - DNA, 50 bp, Artificial Sequence
  Description of Artificial Sequence: Synthetic probe
ataaatactaaaacaaatatcctaataccttttatacctataaaataacc

SEQ ID NO: 3336 - DNA, 50 bp, Artificial Sequence
  Description of Artificial Sequence: Synthetic probe
tccataaactaaataccttatacttacatttcctataaataaaatcatac

SEQ ID NO: 3337 - DNA, 50 bp, Artificial Sequence
  Description of Artificial Sequence: Synthetic probe
cacaaacaaaatataaaacaaaaaataccaaaaacaacaaaccacatccc

SEQ ID NO: 3338 - DNA, 50 bp, Artificial Sequence
  Description of Artificial Sequence: Synthetic probe
ttaaaaaaaatacaaaacractaacactctattaccttactaacatatac

SEQ ID NO: 3339 - DNA, 50 bp, Artificial Sequence
  Description of Artificial Sequence: Synthetic probe
ataggttggtatatgtttagttgtagtagaggttgagaaagttttattta

SEQ ID NO: 3340 - DNA, 50 bp, Artificial Sequence
  Description of Artificial Sequence: Synthetic probe
ttgagaaagttttatttaygtatatgttagtaaggtaatagagtgttagt

SEQ ID NO: 3341 - DNA, 50 bp, Artificial Sequence
  Description of Artificial Sequence: Synthetic probe
ctctacatcctctccaacacttaaaattacctattatttcaatattaacc

SEQ ID NO: 3342 - DNA, 50 bp, Artificial Sequence
  Description of Artificial Sequence: Synthetic probe
atccrcactacrcccaataaaatacctaaattaaaacaataaccaactac

SEQ ID NO: 3343 - DNA, 50 bp, Artificial Sequence
  Description of Artificial Sequence: Synthetic probe
ttttgtttattygtagttggttattgttttaatttaggtattttattggg

SEQ ID NO: 3344 - DNA, 50 bp, Artificial Sequence
  Description of Artificial Sequence: Synthetic probe
aaaacaacrataacraaccttatccccataaccaaaacraaaacctatcc

SEQ ID NO: 3345 - DNA, 50 bp, Artificial Sequence
  Description of Artificial Sequence: Synthetic probe
tattygtagttggttattgttttaatttaggtattttattgggygtagtg

SEQ ID NO: 3346 - DNA, 50 bp, Artificial Sequence
  Description of Artificial Sequence: Synthetic probe
crcaatacraacaaacttccrctttaatcataaaaacaaaatccrctatc

SEQ ID NO: 3347 - DNA, 50 bp, Artificial Sequence
  Description of Artificial Sequence: Synthetic probe
acaaacttccrctttaatcataaaaacaaaatccrctatcrctactcctc

SEQ ID NO: 3348 - DNA, 50 bp, Artificial Sequence
  Description of Artificial Sequence: Synthetic probe
atttygttgttttggtattttygtttygaagatttygtgagtataagatt

SEQ ID NO: 3349 - DNA, 50 bp, Artificial Sequence
  Description of Artificial Sequence: Synthetic probe
cctcraatcttatactcacraaatcttcraaacraaaataccaaaacaac

SEQ ID NO: 3350 - DNA, 50 bp, Artificial Sequence
  Description of Artificial Sequence: Synthetic probe
raaaaatctcaaaaaaacaaaacaactactcacracracaaataaactcc

SEQ ID NO: 3351 - DNA, 50 bp, Artificial Sequence
  Description of Artificial Sequence: Synthetic probe
taaccraatataccraaaaatctcaaaaaaacaaaacaactactcacrac

SEQ ID NO: 3352 - DNA, 50 bp, Artificial Sequence
  Description of Artificial Sequence: Synthetic probe
aaaataccaaaacaacraaatctaaaataaaacraaacccatctaccrcc

SEQ ID NO: 3353 - DNA, 50 bp, Artificial Sequence
  Description of Artificial Sequence: Synthetic probe
aataaaattctataaaaaaaaccacacaaaaatcaaccraaacaataacc

SEQ ID NO: 3354 - DNA, 50 bp, Artificial Sequence
  Description of Artificial Sequence: Synthetic probe
cctatataactctccccacaaaaccctactcttataacttccctaaaaac

SEQ ID NO: 3355 - DNA, 50 bp, Artificial Sequence
  Description of Artificial Sequence: Synthetic probe
aataaaaatctaaatcctccccttccacatttctccaaaaaacctaaacc

SEQ ID NO: 3356 - DNA, 50 bp, Artificial Sequence
  Description of Artificial Sequence: Synthetic probe
caaatccaacrctctaatcatctaaacctctacctactcctaaactattc

SEQ ID NO: 3357 - DNA, 50 bp, Artificial Sequence
  Description of Artificial Sequence: Synthetic probe
tctaatcatctaaacctctacctactcctaaactattcrcaaaatatatc

SEQ ID NO: 3358 - DNA, 50 bp, Artificial Sequence
  Description of Artificial Sequence: Synthetic probe
tttgttgtaggtagatttttgatttttgattttgtttattatgagggagg

SEQ ID NO: 3359 - DNA, 50 bp, Artificial Sequence
  Description of Artificial Sequence: Synthetic probe
ctactacaaacaaactcctaattcctaaccctatccaccataaaaaaaac

SEQ ID NO: 3360 - DNA, 50 bp, Artificial Sequence
  Description of Artificial Sequence: Synthetic probe
atatcacataattctcaatcactactccaactaatatatattaccrcctc

SEQ ID NO: 3361 - DNA, 50 bp, Artificial Sequence
  Description of Artificial Sequence: Synthetic probe
caatttctatactctcttaaaactcaaaattaaataactcattacactac

SEQ ID NO: 3362 - DNA, 50 bp, Artificial Sequence
  Description of Artificial Sequence: Synthetic probe
tctatactctcttaaaactcaaaattaaataactcattacactacraaac

SEQ ID NO: 3363 - DNA, 50 bp, Artificial Sequence
  Description of Artificial Sequence: Synthetic probe
ccctttatttactctcttaccatctcccctttaacttcaaaaccctttac

SEQ ID NO: 3364 - DNA, 50 bp, Artificial Sequence
  Description of Artificial Sequence: Synthetic probe
aaaataataataacaacrctcacattaatctcaaaactaaaaatctatac

SEQ ID NO: 3365 - DNA, 50 bp, Artificial Sequence
  Description of Artificial Sequence: Synthetic probe
tacctctcacttaccccrcacaaatcttcaactttaaaatcaatataaac

SEQ ID NO: 3366 - DNA, 50 bp, Artificial Sequence
  Description of Artificial Sequence: Synthetic probe
acctttataattaacattttccaaactactaatcacctcaatcatatccc

SEQ ID NO: 3367 - DNA, 50 bp, Artificial Sequence
  Description of Artificial Sequence: Synthetic probe
ctttacctcaaaacccaaaatcctcatatctatcctaaacracaactccc

SEQ ID NO: 3368 - DNA, 50 bp, Artificial Sequence
  Description of Artificial Sequence: Synthetic probe
ccacaaaaatctaataatttccctcttccccaccaaacatctataccatc

SEQ ID NO: 3369 - DNA, 50 bp, Artificial Sequence
  Description of Artificial Sequence: Synthetic probe
aaaaacaaataaaaaacactatatccaaattcccaacacraacctctaac

SEQ ID NO: 3370 - DNA, 50 bp, Artificial Sequence
  Description of Artificial Sequence: Synthetic probe
caaaatatcctctcctaatcaaaaacrtttactaacatattccccacccc

SEQ ID NO: 3371 - DNA, 50 bp, Artificial Sequence
  Description of Artificial Sequence: Synthetic probe
acaaaaaaacaaataattttcaaaaattacaatatatctaacccataacc

SEQ ID NO: 3372 - DNA, 50 bp, Artificial Sequence
  Description of Artificial Sequence: Synthetic probe
taatcrttaccatcrcraaaacaataaactactatcaaaacccattaatc

SEQ ID NO: 3373 - DNA, 50 bp, Artificial Sequence
  Description of Artificial Sequence: Synthetic probe
gtttttttgtagtttaagagttaagagatttgtyggggggtttttatttt

SEQ ID NO: 3374 - DNA, 50 bp, Artificial Sequence
  Description of Artificial Sequence: Synthetic probe
acctccactcccatcttaaaattaatattcaatttactcccattcaaaac

SEQ ID NO: 3375 - DNA, 50 bp, Artificial Sequence
  Description of Artificial Sequence: Synthetic probe
aaaatatctctcttccttctccaaatctaactactttctctctctaacrc

SEQ ID NO: 3376 - DNA, 50 bp, Artificial Sequence
  Description of Artificial Sequence: Synthetic probe
ttctacccttctctctaattccacccctactacaataaacaaactatacc

SEQ ID NO: 3377 - DNA, 50 bp, Artificial Sequence
  Description of Artificial Sequence: Synthetic probe
cctaaatcctacaaacttctaccttctcacctaaaaaaacctaaatctcc

SEQ ID NO: 3378 - DNA, 50 bp, Artificial Sequence
  Description of Artificial Sequence: Synthetic probe
aatataaaaatctcrtaacracraaaccttactacraaaaacccttttac

SEQ ID NO: 3379 - DNA, 50 bp, Artificial Sequence
  Description of Artificial Sequence: Synthetic probe
aaactaaaatctttacaacccctaccttaactctactaacaaaaactccc

SEQ ID NO: 3380 - DNA, 50 bp, Artificial Sequence
  Description of Artificial Sequence: Synthetic probe
catacraaaaaaattaatataaaaatctcrtaacracraaaccttactac

SEQ ID NO: 3381 - DNA, 50 bp, Artificial Sequence
  Description of Artificial Sequence: Synthetic probe
aactctactaacaaaaactcccrcaaaaaaacccctcrtaacaaaatccc

SEQ ID NO: 3382 - DNA, 50 bp, Artificial Sequence
  Description of Artificial Sequence: Synthetic probe
tggttttgttgataaaaattttygtaaaagggtttttygtagtaaggttt

SEQ ID NO: 3383 - DNA, 50 bp, Artificial Sequence
  Description of Artificial Sequence: Synthetic probe
taaaaaattcaaaacatcccccaaatactacctcaaccaaaactacatac

SEQ ID NO: 3384 - DNA, 50 bp, Artificial Sequence
  Description of Artificial Sequence: Synthetic probe
tctatttccttaactaacaactcaacraaaccctcccrcttaaatattcc

SEQ ID NO: 3385 - DNA, 50 bp, Artificial Sequence
  Description of Artificial Sequence: Synthetic probe
tcatcaacctttctcttcaaatataaccaccactccataatctttaaccc

SEQ ID NO: 3386 - DNA, 50 bp, Artificial Sequence
  Description of Artificial Sequence: Synthetic probe
aaaaccaaaaaaacacacrtactccaatacctaaccctcttaaaaaaatc

SEQ ID NO: 3387 - DNA, 50 bp, Artificial Sequence
  Description of Artificial Sequence: Synthetic probe
aaatactccaaaaccccrtaaatctacaaatacrtatctacacaaaatac

SEQ ID NO: 3388 - DNA, 50 bp, Artificial Sequence
  Description of Artificial Sequence: Synthetic probe
ccttcctaacaatcttttaatcttaaatcttcaaaatactccaaaacccc

SEQ ID NO: 3389 - DNA, 50 bp, Artificial Sequence
  Description of Artificial Sequence: Synthetic probe
ttttttggtttyggagattatgttattgagaaatagygtatttttagttt

SEQ ID NO: 3390 - DNA, 50 bp, Artificial Sequence
  Description of Artificial Sequence: Synthetic probe
ctcctaatctcraaaaccatatcactaaaaaacaacrcattcccaatccc

SEQ ID NO: 3391 - DNA, 50 bp, Artificial Sequence
  Description of Artificial Sequence: Synthetic probe
ccttaaatatatccctcctaatctcraaaaccatatcactaaaaaacaac

SEQ ID NO: 3392 - DNA, 50 bp, Artificial Sequence
  Description of Artificial Sequence: Synthetic probe
actacttctacraaactaaaaatacrctatttctcaataacataatctcc

SEQ ID NO: 3393 - DNA, 50 bp, Artificial Sequence
  Description of Artificial Sequence: Synthetic probe
ctcacattataataaaaaaaccraaaccaatattccccrttctcraaatc

SEQ ID NO: 3394 - DNA, 50 bp, Artificial Sequence
  Description of Artificial Sequence: Synthetic probe
craccattcacttaacaaatacrattaacaaaaccccraaaaatataacc

SEQ ID NO: 3395 - DNA, 50 bp, Artificial Sequence
  Description of Artificial Sequence: Synthetic probe
caatataaataataaaatctctttccactactataacrattacactctcc

SEQ ID NO: 3396 - DNA, 50 bp, Artificial Sequence
  Description of Artificial Sequence: Synthetic probe
tttgtttattttatyggttatttatttggtaggtgygattggtagagttt

SEQ ID NO: 3397 - DNA, 50 bp, Artificial Sequence
  Description of Artificial Sequence: Synthetic probe
aatctctttccactactataacrattacactctccraaactctaccaatc

SEQ ID NO: 3398 - DNA, 50 bp, Artificial Sequence
  Description of Artificial Sequence: Synthetic probe
tgttatagatygttgtttgtttattttatyggttatttatttggtaggtg

SEQ ID NO: 3399 - DNA, 50 bp, Artificial Sequence
  Description of Artificial Sequence: Synthetic probe
aaacaaaaattacaatatccraaaccraatacccactcctcraactaaac

SEQ ID NO: 3400 - DNA, 50 bp, Artificial Sequence
  Description of Artificial Sequence: Synthetic probe
cttcaaaacratactaactacccaccttccttataccaataaaaataccc

SEQ ID NO: 3401 - DNA, 50 bp, Artificial Sequence
  Description of Artificial Sequence: Synthetic probe
agtgtttatttygatgttttatatttttgtagyggggtattgttttaatt

SEQ ID NO: 3402 - DNA, 50 bp, Artificial Sequence
  Description of Artificial Sequence: Synthetic probe
ccctacrtaactcccaacracraacrtatcaaaaaaataactcttaaaac

SEQ ID NO: 3403 - DNA, 50 bp, Artificial Sequence
  Description of Artificial Sequence: Synthetic probe
aaatctaacctaaaaatacaaatcaaaaatcaccttaacaaaaaaactcc

SEQ ID NO: 3404 - DNA, 50 bp, Artificial Sequence
  Description of Artificial Sequence: Synthetic probe
taatgttggagtttgagttatttttttggtatttaggggaataatagaag

SEQ ID NO: 3405 - DNA, 50 bp, Artificial Sequence
  Description of Artificial Sequence: Synthetic probe
aatactaaaacctaaaccactctcctaacacccaaaaaaacaacaaaaac

SEQ ID NO: 3406 - DNA, 50 bp, Artificial Sequence
  Description of Artificial Sequence: Synthetic probe
ttagtattaggtagatgtttatggagtttgaagggtttaggaygattttt

SEQ ID NO: 3407 - DNA, 50 bp, Artificial Sequence
  Description of Artificial Sequence: Synthetic probe
aaaataatcaaaaaactaatcctaaaaaatcaacraaattccattccccc

SEQ ID NO: 3408 - DNA, 50 bp, Artificial Sequence
  Description of Artificial Sequence: Synthetic probe
attaaaaaaataaaatcctcctatccctaaactcraaaaaataaaatctc

SEQ ID NO: 3409 - DNA, 50 bp, Artificial Sequence
  Description of Artificial Sequence: Synthetic probe
caccattccctaacctctaaccttcataattaatttcattaaactacttc

SEQ ID NO: 3410 - DNA, 50 bp, Artificial Sequence
  Description of Artificial Sequence: Synthetic probe
aatttgggttaaagtgtttgaagtagatagtagtaatgtagattgggtta

SEQ ID NO: 3411 - DNA, 50 bp, Artificial Sequence
  Description of Artificial Sequence: Synthetic probe
atttaaatcaaaatatctaaaacaaacaacaataatacaaactaaatcac

SEQ ID NO: 3412 - DNA, 50 bp, Artificial Sequence
  Description of Artificial Sequence: Synthetic probe
aaaaacracaaaaaaaaccactttataatcaaaaattaaacaacaaaatc

SEQ ID NO: 3413 - DNA, 50 bp, Artificial Sequence
  Description of Artificial Sequence: Synthetic probe
tctcctaccctcataatcctatctcttctacaaaattacacaacataaac

SEQ ID NO: 3414 - DNA, 50 bp, Artificial Sequence
  Description of Artificial Sequence: Synthetic probe
ccaatatataacaaatcccraatctcatcaataacaataattaaatcccc

SEQ ID NO: 3415 - DNA, 50 bp, Artificial Sequence
  Description of Artificial Sequence: Synthetic probe
aaaattacacaacataaacraaaacccaattactatcattaataaaatcc

SEQ ID NO: 3416 - DNA, 50 bp, Artificial Sequence
  Description of Artificial Sequence: Synthetic probe
ataatcctcccttaaatttttacratccttaccaatatataacaaatccc

SEQ ID NO: 3417 - DNA, 50 bp, Artificial Sequence
  Description of Artificial Sequence: Synthetic probe
taggattgtataatatgggyggggatttaattattgttattgatgagatt

SEQ ID NO: 3418 - DNA, 50 bp, Artificial Sequence
  Description of Artificial Sequence: Synthetic probe
aattactatcattaataaaatccraaacttactatacattaacaaaaatc

SEQ ID NO: 3419 - DNA, 50 bp, Artificial Sequence
  Description of Artificial Sequence: Synthetic probe
taaatcctaaacaaattactcacccaaataatcctcccttaaatttttac

SEQ ID NO: 3420 - DNA, 50 bp, Artificial Sequence
  Description of Artificial Sequence: Synthetic probe
taattattgttattgatgagattygggatttgttatatattggtaaggat

SEQ ID NO: 3421 - DNA, 50 bp, Artificial Sequence
  Description of Artificial Sequence: Synthetic probe
tctttcttaaaaaccaaaacattaatattcacttaattcaccaaaaaccc

SEQ ID NO: 3422 - DNA, 50 bp, Artificial Sequence
  Description of Artificial Sequence: Synthetic probe
acaaaactctaaacacttcaaaaatctttctataatcctacatttaacac

SEQ ID NO: 3423 - DNA, 50 bp, Artificial Sequence
  Description of Artificial Sequence: Synthetic probe
ccttattactaacttactatcccttaacctcctttaacttctatttccac

SEQ ID NO: 3424 - DNA, 50 bp, Artificial Sequence
  Description of Artificial Sequence: Synthetic probe
tcccaaattctttcccttttcaatccaccataacaattttctcctaacac

SEQ ID NO: 3425 - DNA, 50 bp, Artificial Sequence
  Description of Artificial Sequence: Synthetic probe
ttttcaatccaccataacaattttctcctaacacraaaaaacaaataccc

SEQ ID NO: 3426 - DNA, 50 bp, Artificial Sequence
  Description of Artificial Sequence: Synthetic probe
atacttacaataactaaaatcttaacctaccataattacttataataatc

SEQ ID NO: 3427 - DNA, 50 bp, Artificial Sequence
  Description of Artificial Sequence: Synthetic probe
atactcaaacaccacaacccccatacaactctcrtatccctttaaaaaac

SEQ ID NO: 3428 - DNA, 50 bp, Artificial Sequence
  Description of Artificial Sequence: Synthetic probe
taaactttccctctctactattatatccccaacrcccttcaaaaaaacac

SEQ ID NO: 3429 - DNA, 50 bp, Artificial Sequence
  Description of Artificial Sequence: Synthetic probe
cctaaaaaacataaatacaacccaaaaccttcaattacatccttacctac

SEQ ID NO: 3430 - DNA, 50 bp, Artificial Sequence
  Description of Artificial Sequence: Synthetic probe
gtagtatattgttttattgtggatgataaggaatatttaattaaggttag

SEQ ID NO: 3431 - DNA, 50 bp, Artificial Sequence
  Description of Artificial Sequence: Synthetic probe
caacacattatttcactataaataacaaaaaacactcaatcaaaatcaac

SEQ ID NO: 3432 - DNA, 50 bp, Artificial Sequence
  Description of Artificial Sequence: Synthetic probe
taaaaaaataaataccacctctttataaacaacttcctacctctaacccc

SEQ ID NO: 3433 - DNA, 50 bp, Artificial Sequence
  Description of Artificial Sequence: Synthetic probe
tactaacaaataataattaaaaaaaacctcaaaactcraattattccctc

SEQ ID NO: 3434 - DNA, 50 bp, Artificial Sequence
  Description of Artificial Sequence: Synthetic probe
aatttactattctccttatcctttataaacccatttatctcccctacacc

SEQ ID NO: 3435 - DNA, 50 bp, Artificial Sequence
  Description of Artificial Sequence: Synthetic probe
ccttatcctttataaacccatttatctcccctacaccraaaaaacaactc

SEQ ID NO: 3436 - DNA, 50 bp, Artificial Sequence
  Description of Artificial Sequence: Synthetic probe
atgttttattttgttgttggtaagtggtagttggaggaagttttaaagtt

SEQ ID NO: 3437 - DNA, 50 bp, Artificial Sequence
  Description of Artificial Sequence: Synthetic probe
ctttaatatcctatacaaaaaacaactcttcctctaaacraataaactac

SEQ ID NO: 3438 - DNA, 50 bp, Artificial Sequence
  Description of Artificial Sequence: Synthetic probe
cacaaacaaaactttaatatcctatacaaaaaacaactcttcctctaaac

SEQ ID NO: 3439 - DNA, 50 bp, Artificial Sequence
  Description of Artificial Sequence: Synthetic probe
ctacctaacaacccraaaatacracaaataatcrctacraaataaacccc

SEQ ID NO: 3440 - DNA, 50 bp, Artificial Sequence
  Description of Artificial Sequence: Synthetic probe
ccraaaaataaaaccatcrtatttacrcataaaatcaaacactactatac

SEQ ID NO: 3441 - DNA, 50 bp, Artificial Sequence
  Description of Artificial Sequence: Synthetic probe
ttgttatgggagtaaatatgtttgttygtatagtagtgtttgattttatg

SEQ ID NO: 3442 - DNA, 50 bp, Artificial Sequence
  Description of Artificial Sequence: Synthetic probe
taccataaaaataaacatacctactcrtacaataatatttaactccatac

SEQ ID NO: 3443 - DNA, 50 bp, Artificial Sequence
  Description of Artificial Sequence: Synthetic probe
ggagtaaatatgtttgttygtatagtagtgtttgattttatgygtaaata

SEQ ID NO: 3444 - DNA, 50 bp, Artificial Sequence
  Description of Artificial Sequence: Synthetic probe
aaataaacatacctactcrtacaataatatttaactccatacrcaaacac

SEQ ID NO: 3445 - DNA, 50 bp, Artificial Sequence
  Description of Artificial Sequence: Synthetic probe
tgttatttgtatatattttttagggagtaggtttyggaaggtggagttat

SEQ ID NO: 3446 - DNA, 50 bp, Artificial Sequence
  Description of Artificial Sequence: Synthetic probe
tcracccttacaaaacaaaataacratacctataaaatccaaacccctcc

SEQ ID NO: 3447 - DNA, 50 bp, Artificial Sequence
  Description of Artificial Sequence: Synthetic probe
cratacaaatctaccatctcraacactcracccttacaaaacaaaataac

SEQ ID NO: 3448 - DNA, 50 bp, Artificial Sequence
  Description of Artificial Sequence: Synthetic probe
crttatcctactctacaaaaaccraatacccraaataacaaacctacacc

SEQ ID NO: 3449 - DNA, 50 bp, Artificial Sequence
  Description of Artificial Sequence: Synthetic probe
aaaaccraatacccraaataacaaacctacaccrcataataataataaac

SEQ ID NO: 3450 - DNA, 50 bp, Artificial Sequence
  Description of Artificial Sequence: Synthetic probe
caaaatccaacaaaatcctaaaactaaaaccctaccraacatactaaccc

SEQ ID NO: 3451 - DNA, 50 bp, Artificial Sequence
  Description of Artificial Sequence: Synthetic probe
raaataacaaacctacaccrcataataataataaacraaccaacatactc

SEQ ID NO: 3452 - DNA, 50 bp, Artificial Sequence
  Description of Artificial Sequence: Synthetic probe
aaaaaaatcraaaacaaaatccaacaaaatcctaaaactaaaaccctacc

SEQ ID NO: 3453 - DNA, 50 bp, Artificial Sequence
  Description of Artificial Sequence: Synthetic probe
aacatactcracaaaaccccaactccaaaaccttactaaattctatcttc

SEQ ID NO: 3454 - DNA, 50 bp, Artificial Sequence
  Description of Artificial Sequence: Synthetic probe
aaaataaacaaataatttatccaaaaccccataattacaaaactaaaacc

SEQ ID NO: 3455 - DNA, 50 bp, Artificial Sequence
  Description of Artificial Sequence: Synthetic probe
aaataaaacctactaaaccccaaccaatcttctaaactaaacctactccc

SEQ ID NO: 3456 - DNA, 50 bp, Artificial Sequence
  Description of Artificial Sequence: Synthetic probe
aatcccaccctaatctcaataacttctataacctaactccaaaaaaaacc

SEQ ID NO: 3457 - DNA, 50 bp, Artificial Sequence
  Description of Artificial Sequence: Synthetic probe
ttctataacctaactccaaaaaaaaccrtcccaactacaatcccaattcc

SEQ ID NO: 3458 - DNA, 50 bp, Artificial Sequence
  Description of Artificial Sequence: Synthetic probe
ctcaaaaaaactcctcttcatcatatcctccaccctaaaaacatccactc

SEQ ID NO: 3459 - DNA, 50 bp, Artificial Sequence
  Description of Artificial Sequence: Synthetic probe
ccttcctactaaaaaaaacttcaacccrttcacaaactccataatacrtc

SEQ ID NO: 3460 - DNA, 50 bp, Artificial Sequence
  Description of Artificial Sequence: Synthetic probe
cacccttcctactaaaaaaaacttcaacccrttcacaaactccataatac

SEQ ID NO: 3461 - DNA, 50 bp, Artificial Sequence
  Description of Artificial Sequence: Synthetic probe
cctcccatctatcctttactcttcaacracrcatcataaaatctataaac

SEQ ID NO: 3462 - DNA, 50 bp, Artificial Sequence
  Description of Artificial Sequence: Synthetic probe
aaaaaaacaaaccctctctccattttccccacttaaccaaaacaaattac

SEQ ID NO: 3463 - DNA, 50 bp, Artificial Sequence
  Description of Artificial Sequence: Synthetic probe
cacaaaacaaaaaaccaaccactacaaaaataccctatccaaataacctc

SEQ ID NO: 3464 - DNA, 50 bp, Artificial Sequence
  Description of Artificial Sequence: Synthetic probe
ttataggatagggggttagttattgtagaggtgttttatttagatgattt

SEQ ID NO: 3465 - DNA, 50 bp, Artificial Sequence
  Description of Artificial Sequence: Synthetic probe
aacaccttaataataataacaaccatatctcctaactaaaacttaaccac

SEQ ID NO: 3466 - DNA, 50 bp, Artificial Sequence
  Description of Artificial Sequence: Synthetic probe
actaaataaacctaaaccaaacrcaacaattcctaaacaacaataatcac

SEQ ID NO: 3467 - DNA, 50 bp, Artificial Sequence
  Description of Artificial Sequence: Synthetic probe
caaatcttaaaatctactccctcttcaaaaaaaatcctccccttacaacc

SEQ ID NO: 3468 - DNA, 50 bp, Artificial Sequence
  Description of Artificial Sequence: Synthetic probe
aaaaactacaaaaaacatctaactaacttctatcccaacaacaaactaac

SEQ ID NO: 3469 - DNA, 50 bp, Artificial Sequence; identical to SEQ ID NO: 3468
  Description of Artificial Sequence: Synthetic probe

SEQ ID NO: 3470 - DNA, 50 bp, Artificial Sequence
  Description of Artificial Sequence: Synthetic probe
aaaactacaaaaaacatctaactaacttctatcccaacaacaaactaaca

SEQ ID NO: 3471 - DNA, 50 bp, Artificial Sequence; identical to SEQ ID NO: 3470
  Description of Artificial Sequence: Synthetic probe

SEQ ID NO: 3472 - DNA, 50 bp, Artificial Sequence; identical to SEQ ID NO: 3470
  Description of Artificial Sequence: Synthetic probe

SEQ ID NO: 3473 - DNA, 50 bp, Artificial Sequence; identical to SEQ ID NO: 3470
  Description of Artificial Sequence: Synthetic probe

SEQ ID NO: 3474 - DNA, 50 bp, Artificial Sequence
  Description of Artificial Sequence: Synthetic probe
gagaaattgtaggagatatttaattggtttttgttttagtagtaggttga

SEQ ID NO: 3475 - DNA, 50 bp, Artificial Sequence; identical to SEQ ID NO: 3474
  Description of Artificial Sequence: Synthetic probe

SEQ ID NO: 3476 - DNA, 50 bp, Artificial Sequence
  Description of Artificial Sequence: Synthetic probe
agaaattgtaggagatatttaattggtttttgttttagtagtaggttgat

SEQ ID NO: 3477 - DNA, 50 bp, Artificial Sequence; identical to SEQ ID NO: 3476
  Description of Artificial Sequence: Synthetic probe

SEQ ID NO: 3478 - DNA, 50 bp, Artificial Sequence; identical to SEQ ID NO: 3476
  Description of Artificial Sequence: Synthetic probe

SEQ ID NO: 3479 - DNA, 50 bp, Artificial Sequence; identical to SEQ ID NO: 3476
  Description of Artificial Sequence: Synthetic probe

SEQ ID NO: 3480 - DNA, 50 bp, Artificial Sequence
  Description of Artificial Sequence: Synthetic probe
attgtaggagatatttaattggtttttgttttagtagtaggttgayggtt

SEQ ID NO: 3481 - DNA, 50 bp, Artificial Sequence
  Description of Artificial Sequence: Synthetic probe
ttgtaggagatatttaattggtttttgttttagtagtaggttgatggttt

SEQ ID NO: 3482 - DNA, 50 bp, Artificial Sequence
  Description of Artificial Sequence: Synthetic probe
ctacaaaaaacatctaactaacttctatcccaacaacaaactaacractc

SEQ ID NO: 3483 - DNA, 50 bp, Artificial Sequence
  Description of Artificial Sequence: Synthetic probe
tacaaaaaacatctaactaacttctatcccaacaacaaactaacaactca

SEQ ID NO: 3484 - DNA, 50 bp, Artificial Sequence
  Description of Artificial Sequence: Synthetic probe
tatgttygtatttgtatgtttttgtttaatattggataggggttttggaa

SEQ ID NO: 3485 - DNA, 50 bp, Artificial Sequence
  Description of Artificial Sequence: Synthetic probe
atgtttgtatttgtatgtttttgtttaatattggataggggttttggaat

SEQ ID NO: 3486 - DNA, 50 bp, Artificial Sequence
  Description of Artificial Sequence: Synthetic probe
ctaaaactcaaaactccaaatcacacaaccaaaaaatcaatcttccccca

SEQ ID NO: 3487 - DNA, 50 bp, Artificial Sequence
  Description of Artificial Sequence: Synthetic probe
tygtatttgtatgtttttatgtattattggagagaggttttggaaygagt

SEQ ID NO: 3488 - DNA, 50 bp, Artificial Sequence
  Description of Artificial Sequence: Synthetic probe
tgtatttgtatgtttttatgtattattggagagaggttttggaatgagtt

SEQ ID NO: 3489 - DNA, 50 bp, Artificial Sequence
  Description of Artificial Sequence: Synthetic probe
aattgaagtttagagttttaggttaygtagttaggaagttagtttttttt

SEQ ID NO: 3490 - DNA, 50 bp, Artificial Sequence
  Description of Artificial Sequence: Synthetic probe
attgaagtttagagttttaggttatgtagttaggaagttagttttttttt

SEQ ID NO: 3491 - DNA, 50 bp, Artificial Sequence
  Description of Artificial Sequence: Synthetic probe
aaattaaacaataacaactactaccttcttcataattaacctcccaaacc

SEQ ID NO: 3492 - DNA, 50 bp, Artificial Sequence
  Description of Artificial Sequence: Synthetic probe
aattaaacaataacaactactaccttcttcataattaacctcccaaacca

SEQ ID NO: 3493 - DNA, 50 bp, Artificial Sequence
  Description of Artificial Sequence: Synthetic probe
tataagtttatttttyggagttagggatttagttgtagtaagatatggtt

SEQ ID NO: 3494 - DNA, 50 bp, Artificial Sequence
  Description of Artificial Sequence: Synthetic probe
ataagtttattttttggagttagggatttagttgtagtaagatatggttt

SEQ ID NO: 3495 - DNA, 50 bp, Artificial Sequence
  Description of Artificial Sequence: Synthetic probe
cctaaatctatattacraaaaacrctcrcrcrattaccaaaaaaaacccc

SEQ ID NO: 3496 - DNA, 50 bp, Artificial Sequence
  Description of Artificial Sequence: Synthetic probe
ctaaacctaaaaaacaaatcccccraacrctaaattaaaaacraaacttc

SEQ ID NO: 3497 - DNA, 50 bp, Artificial Sequence
  Description of Artificial Sequence: Synthetic probe
aaaaaacaaatcccccraacrctaaattaaaaacraaacttcraatacrc

SEQ ID NO: 3498 - DNA, 50 bp, Artificial Sequence
  Description of Artificial Sequence: Synthetic probe
ccraacrctaaattaaaaacraaacttcraatacrcrttaatacrtcaac

SEQ ID NO: 3499 - DNA, 50 bp, Artificial Sequence
  Description of Artificial Sequence: Synthetic probe
cacatacccttatcacccctttctcaaacraaaacatactaaaactctac

SEQ ID NO: 3500 - DNA, 50 bp, Artificial Sequence
  Description of Artificial Sequence: Synthetic probe
tatacraactatcraaaaacccatacaccacrataaccracttataaaac

SEQ ID NO: 3501 - DNA, 50 bp, Artificial Sequence
  Description of Artificial Sequence: Synthetic probe
tccaacaaataacraaaactatacraactatcraaaaacccatacaccac

SEQ ID NO: 3502 - DNA, 50 bp, Artificial Sequence
  Description of Artificial Sequence: Synthetic probe
gttttttgttagattttattgatgtattttagtaggtggyggaagttgta

SEQ ID NO: 3503 - DNA, 50 bp, Artificial Sequence
  Description of Artificial Sequence: Synthetic probe
caaaaaaataactttcaattccccrctctccctcccctaccacaataaac

SEQ ID NO: 3504 - DNA, 50 bp, Artificial Sequence
  Description of Artificial Sequence: Synthetic probe
caactccctaaaaaactaaacaaacccaaaaaaataactttcaattcccc

SEQ ID NO: 3505 - DNA, 50 bp, Artificial Sequence
  Description of Artificial Sequence: Synthetic probe
ttttggttygygtttataggtttattgtattttgttagaattagggattt

SEQ ID NO: 3506 - DNA, 50 bp, Artificial Sequence
  Description of Artificial Sequence: Synthetic probe
cctaacccrcrtccacaaatctattataccctactaaaaccaaaaatccc

SEQ ID NO: 3507 - DNA, 50 bp, Artificial Sequence
  Description of Artificial Sequence: Synthetic probe
ccrcataaaaataaaaaacaaccacttcaaataatccrtatctaacaaac

SEQ ID NO: 3508 - DNA, 50 bp, Artificial Sequence
  Description of Artificial Sequence: Synthetic probe
gttttgagttttgggggaatagaggtttatggttatttagtattgttatt

SEQ ID NO: 3509 - DNA, 50 bp, Artificial Sequence
  Description of Artificial Sequence: Synthetic probe
cctataaccacctcattactcccatattatcccccatttttaataaaaac

SEQ ID NO: 3510 - DNA, 50 bp, Artificial Sequence
  Description of Artificial Sequence: Synthetic probe
caattccaaacctcccctacctcatatcctctcatttaaaaaattactcc

SEQ ID NO: 3511 - DNA, 50 bp, Artificial Sequence
  Description of Artificial Sequence: Synthetic probe
ttaaacctcaacctcataaataaaatacrcctaccacccccaaactaaac

SEQ ID NO: 3512 - DNA, 50 bp, Artificial Sequence
  Description of Artificial Sequence: Synthetic probe
tttgggttttagttttatgggtggaatgygtttgttatttttaggttaga

SEQ ID NO: 3513 - DNA, 50 bp, Artificial Sequence
  Description of Artificial Sequence: Synthetic probe
acataccctcttataacttcataccttcaaaaccctaactaattaaacrc

SEQ ID NO: 3514 - DNA, 50 bp, Artificial Sequence
  Description of Artificial Sequence: Synthetic probe
aaaaaatccrcctaaaaaaatacacaactcaaccctaaaccccataattc

SEQ ID NO: 3515 - DNA, 50 bp, Artificial Sequence
  Description of Artificial Sequence: Synthetic probe
catccattaaccttttcttacctacaacctataaaatccaacrtcaaaac

SEQ ID NO: 3516 - DNA, 50 bp, Artificial Sequence
  Description of Artificial Sequence: Synthetic probe
acccrtactcaaaatcctaaaccraacrctatattccaaaaccatatacc

SEQ ID NO: 3517 - DNA, 50 bp, Artificial Sequence
  Description of Artificial Sequence: Synthetic probe
acccraaaacrctcacctataaaaataaaactaaatcttccraaccttac

SEQ ID NO: 3518 - DNA, 50 bp, Artificial Sequence
  Description of Artificial Sequence: Synthetic probe
catataaataaatcaacttatcctccccacctacccaaatacttaccccc

SEQ ID NO: 3519 - DNA, 50 bp, Artificial Sequence
  Description of Artificial Sequence: Synthetic probe
tttcrataactaaacrtaaataaatataaaaccaacatcaccctctactc

SEQ ID NO: 3520 - DNA, 50 bp, Artificial Sequence
  Description of Artificial Sequence: Synthetic probe
cataaaaacaaccrcaaataaaactacctaccrtattaaaacaataatac

SEQ ID NO: 3521 - DNA, 50 bp, Artificial Sequence
  Description of Artificial Sequence: Synthetic probe
aaccrataaataaacaaaaatacraaccacccraaaaactcraaacraac

SEQ ID NO: 3522 - DNA, 50 bp, Artificial Sequence
  Description of Artificial Sequence: Synthetic probe
acatctcttcctttctaataaaccratcaaactaaaacctaaatcaaaac

SEQ ID NO: 3523 - DNA, 50 bp, Artificial Sequence
  Description of Artificial Sequence: Synthetic probe
ttttttttttaaacaaaaacacaaccaaataattattattcttcccttac

SEQ ID NO: 3524 - DNA, 50 bp, Artificial Sequence
  Description of Artificial Sequence: Synthetic probe
aacattcaaaccaataataattaaaaaaccttaaaacctacccaacratc

SEQ ID NO: 3525 - DNA, 50 bp, Artificial Sequence
  Description of Artificial Sequence: Synthetic probe
actcraaaaactataatcaatatatataaccacctatactaataaaaatc

SEQ ID NO: 3526 - DNA, 50 bp, Artificial Sequence
  Description of Artificial Sequence: Synthetic probe
cacctataaaaacrtaccctccrattatctatataactatataattattc

SEQ ID NO: 3527 - DNA, 50 bp, Artificial Sequence
  Description of Artificial Sequence: Synthetic probe
acttctctaaaataaaataactcraatctcacattatcctaccactcccc

SEQ ID NO: 3528 - DNA, 50 bp, Artificial Sequence
  Description of Artificial Sequence: Synthetic probe
tttccacctacacaactaaaacccctcacttctctaaaataaaataactc

SEQ ID NO: 3529 - DNA, 50 bp, Artificial Sequence
  Description of Artificial Sequence: Synthetic probe
tactaaaaaccaccttttttctccccaataactaaaaacacraccaaaac

SEQ ID NO: 3530 - DNA, 50 bp, Artificial Sequence; identical to SEQ ID NO: 3529
  Description of Artificial Sequence: Synthetic probe

SEQ ID NO: 3531 - DNA, 50 bp, Artificial Sequence
  Description of Artificial Sequence: Synthetic probe
ctatataacatttctttaaatacacaataaattccactttcatcaactcc

SEQ ID NO: 3532 - DNA, 50 bp, Artificial Sequence
  Description of Artificial Sequence: Synthetic probe
attttaaaacccttcctacrctccrccctaaaccaaaatatataaaactc

SEQ ID NO: 3533 - DNA, 50 bp, Artificial Sequence
  Description of Artificial Sequence: Synthetic probe
atacrtatcctcccaatttaacacaattcccaaaaaactcacctcaactc

SEQ ID NO: 3534 - DNA, 50 bp, Artificial Sequence
  Description of Artificial Sequence: Synthetic probe
tacatatcctcccaatttaacacaattcccaaaaaactcacctcaactca

SEQ ID NO: 3535 - DNA, 50 bp, Artificial Sequence
  Description of Artificial Sequence: Synthetic probe
aaggttaaaaaygtagatgttaaaagagtttaggtaggttagtaaatgag

SEQ ID NO: 3536 - DNA, 50 bp, Artificial Sequence
  Description of Artificial Sequence: Synthetic probe
aggttaaaaatgtagatgttaaaagagtttaggtaggttagtaaatgagt

SEQ ID NO: 3537 - DNA, 50 bp, Artificial Sequence
  Description of Artificial Sequence: Synthetic probe
aaactttccctttaatattcatttatttttaatataaatcaacaaaatac

SEQ ID NO: 3538 - DNA, 50 bp, Artificial Sequence
  Description of Artificial Sequence: Synthetic probe
aaaaaaacataaataaattattaataaatttctaaaacattcactaactc

SEQ ID NO: 3539 - DNA, 50 bp, Artificial Sequence
  Description of Artificial Sequence: Synthetic probe
ataattactaaaaatcttacccaaccctaaccttctaaaacttacacatc

SEQ ID NO: 3540 - DNA, 50 bp, Artificial Sequence
  Description of Artificial Sequence: Synthetic probe
tacaataactatttctctaaatccaaatacaactcatcccaacctcatcc

SEQ ID NO: 3541 - DNA, 50 bp, Artificial Sequence
  Description of Artificial Sequence: Synthetic probe
tccccttatccttaatatataaaaacatcccaattcraaaaacattctcc

SEQ ID NO: 3542 - DNA, 50 bp, Artificial Sequence
  Description of Artificial Sequence: Synthetic probe
aaataattttaaattccccttatccttaatatataaaaacatcccaattc

SEQ ID NO: 3543 - DNA, 50 bp, Artificial Sequence
  Description of Artificial Sequence: Synthetic probe
catccratctaaaaataaaaaatacacttcttcaacraaaaatattcccc

SEQ ID NO: 3544 - DNA, 50 bp, Artificial Sequence
  Description of Artificial Sequence: Synthetic probe
attccaccccatttattcctattttattattacccccatatttaaaactc

SEQ ID NO: 3545 - DNA, 50 bp, Artificial Sequence
  Description of Artificial Sequence: Synthetic probe
atagttataattaaatggatatggtggatgagaagggatttttggatatg

SEQ ID NO: 3546 - DNA, 50 bp, Artificial Sequence
  Description of Artificial Sequence: Synthetic probe
aaataataccccaatcactaaaaatccctataactattaaataaataatc

SEQ ID NO: 3547 - DNA, 50 bp, Artificial Sequence
  Description of Artificial Sequence: Synthetic probe
agttgtttatatattaggaggggagggaattgtattttgaggtattaatt

SEQ ID NO: 3548 - DNA, 50 bp, Artificial Sequence
  Description of Artificial Sequence: Synthetic probe
taataacataatctcaactcattataatctccacctcccaaattcaaaca

SEQ ID NO: 3549 - DNA, 50 bp, Artificial Sequence
  Description of Artificial Sequence: Synthetic probe
atcacccaaactaaaattaataacataatctcaactcattataatctcca

SEQ ID NO: 3550 - DNA, 50 bp, Artificial Sequence
  Description of Artificial Sequence: Synthetic probe
aacaaaaattacaataaactaaaatcacaccaccaactccaacttaaaca

SEQ ID NO: 3551 - DNA, 50 bp, Artificial Sequence
  Description of Artificial Sequence: Synthetic probe
ctccacacattatcttccaaatatccataaatcttttctccaatacttca

SEQ ID NO: 3552 - DNA, 50 bp, Artificial Sequence
  Description of Artificial Sequence: Synthetic probe
atttcaccatattacccaaaacaatctcaatctcttaacctcataatcca

SEQ ID NO: 3553 - DNA, 50 bp, Artificial Sequence
  Description of Artificial Sequence: Synthetic probe
atacctaaaaactaaaatactccaaaaattaaaactaaaaccttataaca

SEQ ID NO: 3554 - DNA, 50 bp, Artificial Sequence
  Description of Artificial Sequence: Synthetic probe
ccatatccacataaaaaatctcatcaccatcaaaatcaaacataaactca

SEQ ID NO: 3555 - DNA, 50 bp, Artificial Sequence
  Description of Artificial Sequence: Synthetic probe
taacattaaccactaataaaataaacttatctataaaacaaataaaaaca

SEQ ID NO: 3556 - DNA, 50 bp, Artificial Sequence
  Description of Artificial Sequence: Synthetic probe
tagaggtaattgtgtttataaatagttttgtggaattgagagagtttaat

SEQ ID NO: 3557 - DNA, 50 bp, Artificial Sequence
  Description of Artificial Sequence: Synthetic probe
tagtgtttgagaagaggtttatttaagttttagtgttttattttgtagtt

SEQ ID NO: 3558 - DNA, 50 bp, Artificial Sequence
  Description of Artificial Sequence: Synthetic probe
aatacttaaaaaaaaactcatccaaaccccaatactccaccctacaatca

SEQ ID NO: 3559 - DNA, 50 bp, Artificial Sequence
  Description of Artificial Sequence: Synthetic probe
caatctcctttatttcaaaatttcctcctataatacttatataaaactca

SEQ ID NO: 3560 - DNA, 50 bp, Artificial Sequence
  Description of Artificial Sequence: Synthetic probe
taacaaaccctaaaactttaaaataccaaataatacaaatatctaattca

SEQ ID NO: 3561 - DNA, 50 bp, Artificial Sequence
  Description of Artificial Sequence: Synthetic probe
atgatagattttgaagttttgggatattagatgatatgaatgtttgattt

SEQ ID NO: 3562 - DNA, 50 bp, Artificial Sequence
  Description of Artificial Sequence: Synthetic probe
tttatagaaagggatgatagattttgaagttttgggatattagatgatat

SEQ ID NO: 3563 - DNA, 50 bp, Artificial Sequence
  Description of Artificial Sequence: Synthetic probe
aaaacttcaaaatctatcatccctttctataaacaaacaccttaatcaca

SEQ ID NO: 3564 - DNA, 50 bp, Artificial Sequence
  Description of Artificial Sequence: Synthetic probe
atgtgaaataatggttttaggtattggagatgatttttaagattggagtt

SEQ ID NO: 3565 - DNA, 50 bp, Artificial Sequence
  Description of Artificial Sequence: Synthetic probe
agatataggaaaaggtaatagatagggaagttagttagatgttagagtat

SEQ ID NO: 3566 - DNA, 50 bp, Artificial Sequence
  Description of Artificial Sequence: Synthetic probe
ctcttcaaatatactaaatatttatcaaccaaactaataaaaaaatatca

SEQ ID NO: 3567 - DNA, 50 bp, Artificial Sequence
  Description of Artificial Sequence: Synthetic probe
caattattattatcatcatcataactaaaaaataacataacaatttatca

SEQ ID NO: 3568 - DNA, 50 bp, Artificial Sequence
  Description of Artificial Sequence: Synthetic probe
acaatcttcataacttaatctaccaaaaacaaataatactacttcccacc

SEQ ID NO: 3569 - DNA, 50 bp, Artificial Sequence
  Description of Artificial Sequence: Synthetic probe
caatcttcataacttaatctaccaaaaacaaataatactacttcccacca

SEQ ID NO: 3570 - DNA, 50 bp, Artificial Sequence
  Description of Artificial Sequence: Synthetic probe
aaaaacaaaataaaacattaaatattttcctcttcaacaaatcaaaaccc

SEQ ID NO: 3571 - DNA, 50 bp, Artificial Sequence
  Description of Artificial Sequence: Synthetic probe
aaaacaaaataaaacattaaatattttcctcttcaacaaatcaaaaccca

SEQ ID NO: 3572 - DNA, 50 bp, Artificial Sequence
  Description of Artificial Sequence: Synthetic probe
tatagtttttatggtttagtttgttagagatagatgatgttgttttttat

SEQ ID NO: 3573 - DNA, 50 bp, Artificial Sequence
  Description of Artificial Sequence: Synthetic probe
accctttatcattaaataatatctatctttatccctattaacatttctca

SEQ ID NO: 3574 - DNA, 50 bp, Artificial Sequence
  Description of Artificial Sequence: Synthetic probe
atattacaaaacttttaacaacacccctaacctctacccaatacatacca

SEQ ID NO: 3575 - DNA, 50 bp, Artificial Sequence
  Description of Artificial Sequence: Synthetic probe
atatatataattcccctctatatatccatatatatattattataatttca

SEQ ID NO: 3576 - DNA, 50 bp, Artificial Sequence
  Description of Artificial Sequence: Synthetic probe
acaaaaacaaaaaaccaaataccacatattctcacttataaataaaaaca

SEQ ID NO: 3577 - DNA, 50 bp, Artificial Sequence
  Description of Artificial Sequence: Synthetic probe
catatatatattattataatttcactcccactcataaataaaaacataca

SEQ ID NO: 3578 - DNA, 50 bp, Artificial Sequence
  Description of Artificial Sequence: Synthetic probe
cataatctcattcttttttcttttttttaaaacaaaatctctctctatca

SEQ ID NO: 3579 - DNA, 50 bp, Artificial Sequence
  Description of Artificial Sequence: Synthetic probe
aaatattaccacactatcttccacaataattaaactaatttacactccca

SEQ ID NO: 3580 - DNA, 50 bp, Artificial Sequence
  Description of Artificial Sequence: Synthetic probe
aaaaagttaaaaattaatagatgttgatgaggttgtggagaaaaaggaat

SEQ ID NO: 3581 - DNA, 50 bp, Artificial Sequence
  Description of Artificial Sequence: Synthetic probe
ttttcatataactattaactacatatatatcttcttttaaaaaatatcca

SEQ ID NO: 3582 - DNA, 50 bp, Artificial Sequence
  Description of Artificial Sequence: Synthetic probe
taaaaaatatccattcataccctttacccacttttttataaaattattca

SEQ ID NO: 3583 - DNA, 50 bp, Artificial Sequence
  Description of Artificial Sequence: Synthetic probe
aaaaaccctaaaaaacaacttaaacaatactactcaaaacataaacatca

SEQ ID NO: 3584 - DNA, 50 bp, Artificial Sequence
  Description of Artificial Sequence: Synthetic probe
aattaaatctcatttatcaatttttacttttattacaattacttttacca

SEQ ID NO: 3585 - DNA, 50 bp, Artificial Sequence
  Description of Artificial Sequence: Synthetic probe
atttgttatttgtttaatgatgaatgttaaggaaaggtatttgtatagtt

SEQ ID NO: 3586 - DNA, 50 bp, Artificial Sequence
  Description of Artificial Sequence: Synthetic probe
aaaaataaaaaacctctctcaatccatataaactcattatccaacaaaca

SEQ ID NO: 3587 - DNA, 50 bp, Artificial Sequence
  Description of Artificial Sequence: Synthetic probe
tctatcttacacaaaaaaactttccaacacctataataaacctcaaccca

SEQ ID NO: 3588 - DNA, 50 bp, Artificial Sequence
  Description of Artificial Sequence: Synthetic probe
atttaacaaaaataaaaaacctctctcaatccatataaactcattatcca

SEQ ID NO: 3589 - DNA, 50 bp, Artificial Sequence
  Description of Artificial Sequence: Synthetic probe
ttgtataggagagttttttagtatttgtgataagttttagtttgtttgtt

SEQ ID NO: 3590 - DNA, 50 bp, Artificial Sequence
  Description of Artificial Sequence: Synthetic probe
tacacaaaaaaactttccaacacctataataaacctcaacccacctacca

SEQ ID NO: 3591 - DNA, 50 bp, Artificial Sequence
  Description of Artificial Sequence: Synthetic probe
ttaccttacattaaaattataacctaaaaacataaacaactaaaacaaca

SEQ ID NO: 3592 - DNA, 50 bp, Artificial Sequence
  Description of Artificial Sequence: Synthetic probe
attttatctctttcctcttcctacttcatccaaccataacacaataaaca

SEQ ID NO: 3593 - DNA, 50 bp, Artificial Sequence
  Description of Artificial Sequence: Synthetic probe
atttctatctttaacctaattttatctctttcctcttcctacttcatcca

SEQ ID NO: 3594 - DNA, 50 bp, Artificial Sequence
  Description of Artificial Sequence: Synthetic probe
tatgatttgaagatataagtaattggaataatgtttattgtgttatggtt

SEQ ID NO: 3595 - DNA, 50 bp, Artificial Sequence
  Description of Artificial Sequence: Synthetic probe
ataacctaaaaacataaacaactaaaacaacattcactatattataacca

SEQ ID NO: 3596 - DNA, 50 bp, Artificial Sequence
  Description of Artificial Sequence: Synthetic probe
aaagagataaaattaggttaaagatagaaatggtatttattgggttagtt

SEQ ID NO: 3597 - DNA, 50 bp, Artificial Sequence
  Description of Artificial Sequence: Synthetic probe
actaaattaaaaataaaaataacatctattaaaccaatcataacctcaca

SEQ ID NO: 3598 - DNA, 50 bp, Artificial Sequence
  Description of Artificial Sequence: Synthetic probe
aattaggttaaagatagaaatggtatttattgggttagttgtggttttat

SEQ ID NO: 3599 - DNA, 50 bp, Artificial Sequence
  Description of Artificial Sequence: Synthetic probe
aataaacaccatttctttttttctttttttaaaacaatcttactctatca

SEQ ID NO: 3600 - DNA, 50 bp, Artificial Sequence
  Description of Artificial Sequence: Synthetic probe
taccttacttaaactttcccttcaccccacaaaatataaaatctaaaaca

SEQ ID NO: 3601 - DNA, 50 bp, Artificial Sequence
  Description of Artificial Sequence: Synthetic probe
ggatttatggtttgttttatagtattatatttgtgttgtttattagttgt

SEQ ID NO: 3602 - DNA, 50 bp, Artificial Sequence
  Description of Artificial Sequence: Synthetic probe
aactcataacttaccccataacatcacatctatactacttaccaactaca

SEQ ID NO: 3603 - DNA, 50 bp, Artificial Sequence
  Description of Artificial Sequence: Synthetic probe
ataaccctaaaaaaaatccttcaactctctaaactttaatatcctcctca

SEQ ID NO: 3604 - DNA, 50 bp, Artificial Sequence
  Description of Artificial Sequence: Synthetic probe
taaactctttacatatacttatcatattttaatatcattctcattttcca

SEQ ID NO: 3605 - DNA, 50 bp, Artificial Sequence
  Description of Artificial Sequence: Synthetic probe
aaatccttcaactctctaaactttaatatcctcctcaaaaaataaaaaca

SEQ ID NO: 3606 - DNA, 50 bp, Artificial Sequence
  Description of Artificial Sequence: Synthetic probe
aaatacaaaaattaattccttacatcattctcttaatatatatattctca

SEQ ID NO: 3607 - DNA, 50 bp, Artificial Sequence
  Description of Artificial Sequence: Synthetic probe
catacaacccctcaataaaaaattattaaaaccaaaaaaataaaaccaca

SEQ ID NO: 3608 - DNA, 50 bp, Artificial Sequence
  Description of Artificial Sequence: Synthetic probe
ccaaacacatctctctcttaaaaataattactacttctttaccaaccaca

SEQ ID NO: 3609 - DNA, 50 bp, Artificial Sequence
  Description of Artificial Sequence: Synthetic probe
ccatttatcaaaaacaaaataattctaaataaaaactccattaacttaca

SEQ ID NO: 3610 - DNA, 50 bp, Artificial Sequence
  Description of Artificial Sequence: Synthetic probe
aaccaaccaaattttaaatataatcaatatccctaaatttcctttaaaca

SEQ ID NO: 3611 - DNA, 50 bp, Artificial Sequence
  Description of Artificial Sequence: Synthetic probe
tttacattaaataatccttatattctatattttaatacttcttaaataca

SEQ ID NO: 3612 - DNA, 50 bp, Artificial Sequence
  Description of Artificial Sequence: Synthetic probe
aaaaatccctaaataaataaaatcaacttaacatttaaaaaattccatac

SEQ ID NO: 3613 - DNA, 50 bp, Artificial Sequence
  Description of Artificial Sequence: Synthetic probe
aaaatccctaaataaataaaatcaacttaacatttaaaaaattccataca

SEQ ID NO: 3614 - DNA, 50 bp, Artificial Sequence
  Description of Artificial Sequence: Synthetic probe
ctaacttctatatataaattaactatttttcttttaacttccacaataca

SEQ ID NO: 3615 - DNA, 50 bp, Artificial Sequence
  Description of Artificial Sequence: Synthetic probe
tagagatttttaggtaggtggggttagtttaatatttggagaattttata

SEQ ID NO: 3616 - DNA, 50 bp, Artificial Sequence
  Description of Artificial Sequence: Synthetic probe
agagatttttaggtaggtggggttagtttaatatttggagaattttatat

SEQ ID NO: 3617 - DNA, 50 bp, Artificial Sequence
  Description of Artificial Sequence: Synthetic probe
aataaacatttctaaacaacctcrtaaataaataaaatcatcaattatac

SEQ ID NO: 3618 - DNA, 50 bp, Artificial Sequence
  Description of Artificial Sequence: Synthetic probe
ataaacatttctaaacaacctcataaataaataaaatcatcaattataca

SEQ ID NO: 3619 - DNA, 50 bp, Artificial Sequence
  Description of Artificial Sequence: Synthetic probe
ttagggaaaaatttttggaggttgtaagttagaatattttgaaggatgtt

SEQ ID NO: 3620 - DNA, 50 bp, Artificial Sequence
  Description of Artificial Sequence: Synthetic probe
tcaaaaaaaaattcctaaaaattataaaccaaaacatcctaaaaaatacc

SEQ ID NO: 3621 - DNA, 50 bp, Artificial Sequence
  Description of Artificial Sequence: Synthetic probe
caaaaaaaaattcctaaaaattataaaccaaaacatcctaaaaaatacca

SEQ ID NO: 3622 - DNA, 50 bp, Artificial Sequence
  Description of Artificial Sequence: Synthetic probe
cactatattaaccacactaatcttaaactcctaacctcataatctaccca

SEQ ID NO: 3623 - DNA, 50 bp, Artificial Sequence
  Description of Artificial Sequence: Synthetic probe
aaaaaaacattaaattaaaatcttctctaatatatacatatctaccaatc

SEQ ID NO: 3624 - DNA, 50 bp, Artificial Sequence
  Description of Artificial Sequence: Synthetic probe
aaaaaacattaaattaaaatcttctctaatatatacatatctaccaatca

SEQ ID NO: 3625 - DNA, 50 bp, Artificial Sequence
  Description of Artificial Sequence: Synthetic probe
cacccacaatatcttcacctccacaaaaactcatcacaataatcaaaaca

SEQ ID NO: 3626 - DNA, 50 bp, Artificial Sequence
  Description of Artificial Sequence: Synthetic probe
accccaacctactctttttattatctatactattatattcactaaaaaca

SEQ ID NO: 3627 - DNA, 50 bp, Artificial Sequence
  Description of Artificial Sequence: Synthetic probe
ataaaaacctccaaaccataatcactaaatataatataaacaaaataaca

SEQ ID NO: 3628 - DNA, 50 bp, Artificial Sequence
  Description of Artificial Sequence: Synthetic probe
ttatattcactaaaaacactattctatttatattatattcaataactaca

SEQ ID NO: 3629 - DNA, 50 bp, Artificial Sequence
  Description of Artificial Sequence: Synthetic probe
actaatttttaaaacaatcataataaaacaacataaaaacctccaaacca

SEQ ID NO: 3630 - DNA, 50 bp, Artificial Sequence
  Description of Artificial Sequence: Synthetic probe
tatccactaataaaaacctcactaatttttaaaacaatcataataaaaca

SEQ ID NO: 3631 - DNA, 50 bp, Artificial Sequence
  Description of Artificial Sequence: Synthetic probe
attctatttatattatattcaataactacaacctaaaaatctctatatca

SEQ ID NO: 3632 - DNA, 50 bp, Artificial Sequence
  Description of Artificial Sequence: Synthetic probe
aaaatcattccatcaattatatactctataaatatttaaaatattaccca

SEQ ID NO: 3633 - DNA, 50 bp, Artificial Sequence
  Description of Artificial Sequence: Synthetic probe
tttgtgttagtttttatgtggaaatgtgagtaagtttgagagaaagaaat

SEQ ID NO: 3634 - DNA, 50 bp, Artificial Sequence
  Description of Artificial Sequence: Synthetic probe
ccaaacataataatatatacctataataccaactactcaaaaaactacca

SEQ ID NO: 3635 - DNA, 50 bp, Artificial Sequence
  Description of Artificial Sequence: Synthetic probe
aacaaataaaacttccactaccaaacaaaatcataataaaaacaaccaca

SEQ ID NO: 3636 - DNA, 50 bp, Artificial Sequence
  Description of Artificial Sequence: Synthetic probe
ccattataattttattcaacaataaaaatttcacctacttctccaaaaca

SEQ ID NO: 3637 - DNA, 50 bp, Artificial Sequence
  Description of Artificial Sequence: Synthetic probe
cataactaatcctaaccttcatataattctactacctatatacctaccca

SEQ ID NO: 3638 - DNA, 50 bp, Artificial Sequence
  Description of Artificial Sequence: Synthetic probe
aactcactatatactcaaacatatatattaaataacaattactatattca

SEQ ID NO: 3639 - DNA, 50 bp, Artificial Sequence
  Description of Artificial Sequence: Synthetic probe
tctactacctatatacctacccatcttccccaaaatctatataatcctca

SEQ ID NO: 3640 - DNA, 50 bp, Artificial Sequence
  Description of Artificial Sequence: Synthetic probe
aaaccaaactaaacttttttatcaaaacatatataaaccttttaccatca

SEQ ID NO: 3641 - DNA, 50 bp, Artificial Sequence
  Description of Artificial Sequence: Synthetic probe
caatatacttatctaaaaataccaaaacaaaataacaaccatacaataca

SEQ ID NO: 3642 - DNA, 50 bp, Artificial Sequence
  Description of Artificial Sequence: Synthetic probe
atttcttccatcattttatatattaaaattctttcttcccctattctcca

SEQ ID NO: 3643 - DNA, 50 bp, Artificial Sequence
  Description of Artificial Sequence: Synthetic probe
aatattcaaattatattttaccacaaccatatttctcaatacaccctaca

SEQ ID NO: 3644 - DNA, 50 bp, Artificial Sequence
  Description of Artificial Sequence: Synthetic probe
aaactacctaacaataacctaaattcaacaaatttaaaaattttaaccca

SEQ ID NO: 3645 - DNA, 50 bp, Artificial Sequence
  Description of Artificial Sequence: Synthetic probe
ctaaaaaacataactataacaaaacacaacttaaacatcataattaaaca

SEQ ID NO: 3646 - DNA, 50 bp, Artificial Sequence
  Description of Artificial Sequence: Synthetic probe
aatttaagtaaagagaggtagaatggtggatgtatattattggtagtagt

SEQ ID NO: 3647 - DNA, 50 bp, Artificial Sequence
  Description of Artificial Sequence: Synthetic probe
aacatcataattaaacactacaactctaccactactaccaataatataca

SEQ ID NO: 3648 - DNA, 50 bp, Artificial Sequence
  Description of Artificial Sequence: Synthetic probe
accacctaataatcaaaaaaatcttatttaccttctacttaaaaacaaca

SEQ ID NO: 3649 - DNA, 50 bp, Artificial Sequence
  Description of Artificial Sequence: Synthetic probe
aatatgtttatagagagaagggtataggaataaagtagaggtaatgtgtt

SEQ ID NO: 3650 - DNA, 50 bp, Artificial Sequence
  Description of Artificial Sequence: Synthetic probe
caaaataaaattcacaataacccttaatatctaaaaacaccaactaaaca

SEQ ID NO: 3651 - DNA, 50 bp, Artificial Sequence
  Description of Artificial Sequence: Synthetic probe
aacctcataaacattataataaacactatcttcatcatccaaaacctaca

SEQ ID NO: 3652 - DNA, 50 bp, Artificial Sequence
  Description of Artificial Sequence: Synthetic probe
aattttattttggaagggaaggtaagattgagattggttatagttgaagt

SEQ ID NO: 3653 - DNA, 50 bp, Artificial Sequence
  Description of Artificial Sequence: Synthetic probe
ataaataacaatacacctacaacaaaacaaacataaaatcaataaatcca

SEQ ID NO: 3654 - DNA, 50 bp, Artificial Sequence
  Description of Artificial Sequence: Synthetic probe
tttttaattctaaaatttttactataacaattctaaaccaaaaacaaaca

SEQ ID NO: 3655 - DNA, 50 bp, Artificial Sequence
  Description of Artificial Sequence: Synthetic probe
cactaccacccacccctcaattcaaacaacaataaaattaataaatacca

SEQ ID NO: 3656 - DNA, 50 bp, Artificial Sequence
  Description of Artificial Sequence: Synthetic probe
actacacctctattcaaaactcctaaatatatctataacttctactccca

SEQ ID NO: 3657 - DNA, 50 bp, Artificial Sequence
  Description of Artificial Sequence: Synthetic probe
actacataattatctaatacaacttcattcaaaaaataaaacaaactaca

SEQ ID NO: 3658 - DNA, 50 bp, Artificial Sequence
  Description of Artificial Sequence: Synthetic probe
aaaacaaaaataaaaaccacaaacatatctaaaaaccctaaataaaaaca

SEQ ID NO: 3659 - DNA, 50 bp, Artificial Sequence
  Description of Artificial Sequence: Synthetic probe
agttatatggttatttagtatagttttatttaggaggtgaggtagattgt

SEQ ID NO: 3660 - DNA, 50 bp, Artificial Sequence
  Description of Artificial Sequence: Synthetic probe
ttaaaacaatataacaacaacaataaatactatatcctccactaaattca

SEQ ID NO: 3661 - DNA, 50 bp, Artificial Sequence
  Description of Artificial Sequence: Synthetic probe
aattaaaaatatcctcataaatttcataactatttaaaaccataaaatca

SEQ ID NO: 3662 - DNA, 50 bp, Artificial Sequence
  Description of Artificial Sequence: Synthetic probe
attcaccatctccaaaaaaaaactctcacaaaaaaaataaatcaacaaca

SEQ ID NO: 3663 - DNA, 50 bp, Artificial Sequence
  Description of Artificial Sequence: Synthetic probe
tggttagaaatatttttatggattttatagttgtttagagttatgaggtt

SEQ ID NO: 3664 - DNA, 50 bp, Artificial Sequence
  Description of Artificial Sequence: Synthetic probe
aaaaacatacaacctaaatctcttacatacacaattaaaaataaaattca

SEQ ID NO: 3665 - DNA, 50 bp, Artificial Sequence
  Description of Artificial Sequence: Synthetic probe
ccccaccttccatcaaatcaataataacattaaattctcataaaaataca

SEQ ID NO: 3666 - DNA, 50 bp, Artificial Sequence
  Description of Artificial Sequence: Synthetic probe
aaataaaattcacactcctataaaaatctaataccaccactaatctaaca

SEQ ID NO: 3667 - DNA, 50 bp, Artificial Sequence
  Description of Artificial Sequence: Synthetic probe
taaaccacacaataaataaaccaacattaccaactaaaccccaccttcca

SEQ ID NO: 3668 - DNA, 50 bp, Artificial Sequence
  Description of Artificial Sequence: Synthetic probe
ttagaaattggattatgtagtgggtgagttagtattattaattgagtttt

SEQ ID NO: 3669 - DNA, 50 bp, Artificial Sequence
  Description of Artificial Sequence: Synthetic probe
ggtttgtatttttatgagaatttaatgttattattgatttgatggaaggt

SEQ ID NO: 3670 - DNA, 50 bp, Artificial Sequence
  Description of Artificial Sequence: Synthetic probe
ccaaaccataaaccaataccaattaataacctattaaaaactaaaccaca

SEQ ID NO: 3671 - DNA, 50 bp, Artificial Sequence
  Description of Artificial Sequence: Synthetic probe
aatctaacaaaaaacaaaactcaattaataatactaactcacccactaca

SEQ ID NO: 3672 - DNA, 50 bp, Artificial Sequence
  Description of Artificial Sequence: Synthetic probe
tttgggttatggattagtattagttggtggtttgttagaaattggattat

SEQ ID NO: 3673 - DNA, 50 bp, Artificial Sequence
  Description of Artificial Sequence: Synthetic probe
acataatccaatttctaacaaaccaccaactaatactaatccataaccca

SEQ ID NO: 3674 - DNA, 50 bp, Artificial Sequence
  Description of Artificial Sequence: Synthetic probe
aaaaaactaaacaaaaaatacaaaaatatcccaaaaatccccaaccccca

SEQ ID NO: 3675 - DNA, 50 bp, Artificial Sequence
  Description of Artificial Sequence: Synthetic probe
tgtgtggtttagtttttaataggttattaattggtattggtttatggttt

SEQ ID NO: 3676 - DNA, 50 bp, Artificial Sequence
  Description of Artificial Sequence: Synthetic probe
ctaaaatacctctacaccttctactcaatttttctataaacctacaacca

SEQ ID NO: 3677 - DNA, 50 bp, Artificial Sequence
  Description of Artificial Sequence: Synthetic probe
atatatataaaatatatttaaaaccctattactaaaaacttcttaacaca

SEQ ID NO: 3678 - DNA, 50 bp, Artificial Sequence
  Description of Artificial Sequence: Synthetic probe
acacacacacaaatacacacaactccaaaatactaaattcttacctcaca

SEQ ID NO: 3679 - DNA, 50 bp, Artificial Sequence
  Description of Artificial Sequence: Synthetic probe
tcaaacaatcctcccctattaacctccaaaatactaaaatcacaaacaca

SEQ ID NO: 3680 - DNA, 50 bp, Artificial Sequence
  Description of Artificial Sequence: Synthetic probe
taatatcacactatttaaaatttacaaaattaataaatcacaaaaactca

SEQ ID NO: 3681 - DNA, 50 bp, Artificial Sequence
  Description of Artificial Sequence: Synthetic probe
acaaaacaaaaccttatctctacaacacaaaaataaattaatacataaca

SEQ ID NO: 3682 - DNA, 50 bp, Artificial Sequence
  Description of Artificial Sequence: Synthetic probe
acactcctcttacctcaacctctaaaataactaaaactacaaaaatacca

SEQ ID NO: 3683 - DNA, 50 bp, Artificial Sequence
  Description of Artificial Sequence: Synthetic probe
ttaattaaactccaaaaaataacaataacacaaattattaacacctatca

SEQ ID NO: 3684 - DNA, 50 bp, Artificial Sequence
  Description of Artificial Sequence: Synthetic probe
tattacaaataaaacacttcatacacaaactaacacataataaataatca

SEQ ID NO: 3685 - DNA, 50 bp, Artificial Sequence
  Description of Artificial Sequence: Synthetic probe
acaacaatctcattaccacactaaaattaaataattccttaatacaatca

SEQ ID NO: 3686 - DNA, 50 bp, Artificial Sequence
  Description of Artificial Sequence: Synthetic probe
atattttagtttttgagttttattatgaagatagagtttgggagtttttg

SEQ ID NO: 3687 - DNA, 50 bp, Artificial Sequence
  Description of Artificial Sequence: Synthetic probe
tattttagtttttgagttttattatgaagatagagtttgggagtttttgt

SEQ ID NO: 3688 - DNA, 50 bp, Artificial Sequence
  Description of Artificial Sequence: Synthetic probe
catctcaatctctaaatttcatcataaaaacaaaatctaaaaacttctac

SEQ ID NO: 3689 - DNA, 50 bp, Artificial Sequence
  Description of Artificial Sequence: Synthetic probe
atctcaatctctaaatttcatcataaaaacaaaatctaaaaacttctaca

SEQ ID NO: 3690 - DNA, 50 bp, Artificial Sequence
  Description of Artificial Sequence: Synthetic probe
ctaaacccacatcaaaaaaaccacaatatataataacctccctcataacc

SEQ ID NO: 3691 - DNA, 50 bp, Artificial Sequence
  Description of Artificial Sequence: Synthetic probe
taaacccacatcaaaaaaaccacaatatataataacctccctcataacca

SEQ ID NO: 3692 - DNA, 50 bp, Artificial Sequence
  Description of Artificial Sequence: Synthetic probe
ctttatcattaacrttataacctattaattcctaataacactcttttccc

SEQ ID NO: 3693 - DNA, 50 bp, Artificial Sequence
  Description of Artificial Sequence: Synthetic probe
tttatcattaacattataacctattaattcctaataacactcttttccca

SEQ ID NO: 3694 - DNA, 50 bp, Artificial Sequence
  Description of Artificial Sequence: Synthetic probe
aaacacattatcctatacacraaatactaacaaccaacattatatccatc

SEQ ID NO: 3695 - DNA, 50 bp, Artificial Sequence
  Description of Artificial Sequence: Synthetic probe
aacacattatcctatacacaaaatactaacaaccaacattatatccatca

SEQ ID NO: 3696 - DNA, 50 bp, Artificial Sequence
  Description of Artificial Sequence: Synthetic probe
ccaaaaccacaaaaatctaaaaaatccaatcctccttcctaataaaaaca

SEQ ID NO: 3697 - DNA, 50 bp, Artificial Sequence
  Description of Artificial Sequence: Synthetic probe
taaatatattgttttgtgtaygggatgttgatagttagtattgtgtttat

SEQ ID NO: 3698 - DNA, 50 bp, Artificial Sequence
  Description of Artificial Sequence: Synthetic probe
aaatatattgttttgtgtatgggatgttgatagttagtattgtgtttatt

SEQ ID NO: 3699 - DNA, 50 bp, Artificial Sequence
  Description of Artificial Sequence: Synthetic probe
tcctccttcctaataaaaacrataaacacaatactaactatcaacatccc

SEQ ID NO: 3700 - DNA, 50 bp, Artificial Sequence
  Description of Artificial Sequence: Synthetic probe
cctccttcctaataaaaacaataaacacaatactaactatcaacatccca

SEQ ID NO: 3701 - DNA, 50 bp, Artificial Sequence
  Description of Artificial Sequence: Synthetic probe
aaacctaaaatcaaattaatttcacaaattactaattccaaatattcaac

SEQ ID NO: 3702 - DNA, 50 bp, Artificial Sequence
  Description of Artificial Sequence: Synthetic probe
aacctaaaatcaaattaatttcacaaattactaattccaaatattcaaca

SEQ ID NO: 3703 - DNA, 50 bp, Artificial Sequence
  Description of Artificial Sequence: Synthetic probe
tataataatccttaatcactaatatttcaaacattctaaaaaatcacatc

SEQ ID NO: 3704 - DNA, 50 bp, Artificial Sequence
  Description of Artificial Sequence: Synthetic probe
ataataatccttaatcactaatatttcaaacattctaaaaaatcacatca

SEQ ID NO: 3705 - DNA, 50 bp, Artificial Sequence
  Description of Artificial Sequence: Synthetic probe
tctaaaaccaatacactaaacatcaatattaaaaaaccataaataataca

SEQ ID NO: 3706 - DNA, 50 bp, Artificial Sequence
  Description of Artificial Sequence: Synthetic probe
attttacttacttctacattaccataaaaacatttctaaacaaatccacc

SEQ ID NO: 3707 - DNA, 50 bp, Artificial Sequence
  Description of Artificial Sequence: Synthetic probe
cccttattccccttacaaaaaatacratataactctcttctccaataccc

SEQ ID NO: 3708 - DNA, 50 bp, Artificial Sequence
  Description of Artificial Sequence: Synthetic probe
atactaaaacaaacaaaccccaaacctttcccttacttttaatctacrtc

SEQ ID NO: 3709 - DNA, 50 bp, Artificial Sequence
  Description of Artificial Sequence: Synthetic probe
aaaatactaaaacaaacaaaccccaaacctttcccttacttttaatctac

SEQ ID NO: 3710 - DNA, 50 bp, Artificial Sequence
  Description of Artificial Sequence: Synthetic probe
tacctaataactaaaaattccataaaaataaaaatacaataaccctcacc

SEQ ID NO: 3711 - DNA, 50 bp, Artificial Sequence
  Description of Artificial Sequence: Synthetic probe
aacattttcataaattctttaaaaatccacactcccctaattcaaaaccc

SEQ ID NO: 3712 - DNA, 50 bp, Artificial Sequence
  Description of Artificial Sequence: Synthetic probe
gtgtttagtgattgagaattttatgagaatggagatgtagtagtttttat

SEQ ID NO: 3713 - DNA, 50 bp, Artificial Sequence
  Description of Artificial Sequence: Synthetic probe
tacaacttatacttctatttcttctacctaatataatttcaaacccctac

SEQ ID NO: 3714 - DNA, 50 bp, Artificial Sequence
  Description of Artificial Sequence: Synthetic probe
aacaaaatctcactctttaacccaaaccaaactacaataatactatctca

SEQ ID NO: 3715 - DNA, 50 bp, Artificial Sequence
  Description of Artificial Sequence: Synthetic probe
accaaaataacaccactacaatccaacctaaaccaaaaaataaaactcca

SEQ ID NO: 3716 - DNA, 50 bp, Artificial Sequence
  Description of Artificial Sequence: Synthetic probe
aaataaaaaaacccaacaaactaaataccttcaacaatcattttaccaca

SEQ ID NO: 3717 - DNA, 50 bp, Artificial Sequence
  Description of Artificial Sequence: Synthetic probe
acaaaataacatatataaaataacaaaaaataaataccacatttaccaca

SEQ ID NO: 3718 - DNA, 50 bp, Artificial Sequence
  Description of Artificial Sequence: Synthetic probe
acataaatatcaactttttttaacttattcctattacaaatataacttca

SEQ ID NO: 3719 - DNA, 50 bp, Artificial Sequence
  Description of Artificial Sequence: Synthetic probe
aatacaatccaaactacattaaaaattaaaaccaaacacaataaatcaca

SEQ ID NO: 3720 - DNA, 50 bp, Artificial Sequence
  Description of Artificial Sequence: Synthetic probe
tataaaaacaaatacaatccaaactacattaaaaattaaaaccaaacaca

SEQ ID NO: 3721 - DNA, 50 bp, Artificial Sequence
  Description of Artificial Sequence: Synthetic probe
tattaatataaaaacaaatacaatccaaactacattaaaaattaaaacca

SEQ ID NO: 3722 - DNA, 50 bp, Artificial Sequence
  Description of Artificial Sequence: Synthetic probe
aaacccaaaatcaaaaatacccaaaactaaattctaacttataaacccca

SEQ ID NO: 3723 - DNA, 50 bp, Artificial Sequence
  Description of Artificial Sequence: Synthetic probe
tacttaattaacaactttacaactaaatcctctcaacatatttttaacca

SEQ ID NO: 3724 - DNA, 50 bp, Artificial Sequence
  Description of Artificial Sequence: Synthetic probe
taaaaaaccaaacattaaaattccattaaaacattaaaaatcacaacaca

SEQ ID NO: 3725 - DNA, 50 bp, Artificial Sequence
  Description of Artificial Sequence: Synthetic probe
aatgtattttggggaattttgtgaggaggatattgatagttttatagttt

SEQ ID NO: 3726 - DNA, 50 bp, Artificial Sequence
  Description of Artificial Sequence: Synthetic probe
atatactttaaaaaattctataaaaaaaatatcaacaaccttacaatcca

SEQ ID NO: 3727 - DNA, 50 bp, Artificial Sequence
  Description of Artificial Sequence: Synthetic probe
aaaattactaaatatctataatattctaattcaacaattacattcactca

SEQ ID NO: 3728 - DNA, 50 bp, Artificial Sequence
  Description of Artificial Sequence: Synthetic probe
aaactctatataaaaaatatcctattctaatctaatcctaacaaaaaaca

SEQ ID NO: 3729 - DNA, 50 bp, Artificial Sequence
  Description of Artificial Sequence: Synthetic probe
ctacttcctaaattttctctctcaattaataacaaattaattatacttca

SEQ ID NO: 3730 - DNA, 50 bp, Artificial Sequence
  Description of Artificial Sequence: Synthetic probe
gaaattttgtgtagaaagtgttttgttttgatttagttttgataggaaat

SEQ ID NO: 3731 - DNA, 50 bp, Artificial Sequence
  Description of Artificial Sequence: Synthetic probe
ttcattccttcctttatttattacaatattcatcataaacttataataca

SEQ ID NO: 3732 - DNA, 50 bp, Artificial Sequence
  Description of Artificial Sequence: Synthetic probe
caaaacatcacacatctattatttcctaaatacctacttaatacctaaca

SEQ ID NO: 3733 - DNA, 50 bp, Artificial Sequence
  Description of Artificial Sequence: Synthetic probe
tctatctttctcactataacatatactccacaaaaacaaaacatcacaca

SEQ ID NO: 3734 - DNA, 50 bp, Artificial Sequence
  Description of Artificial Sequence: Synthetic probe
taagtttatgatgtgttaggtattaagtaggtatttaggaaataatagat

SEQ ID NO: 3735 - DNA, 50 bp, Artificial Sequence
  Description of Artificial Sequence: Synthetic probe
aactaattctatctttctcactataacatatactccacaaaaacaaaaca

SEQ ID NO: 3736 - DNA, 50 bp, Artificial Sequence
  Description of Artificial Sequence: Synthetic probe
taatacaccaaacactaaataaacactcaaaaaataacaaacatataaca

SEQ ID NO: 3737 - DNA, 50 bp, Artificial Sequence
  Description of Artificial Sequence: Synthetic probe
aaactatctaacaattacctatatttaacaaatttataaattttaaccca

SEQ ID NO: 3738 - DNA, 50 bp, Artificial Sequence
  Description of Artificial Sequence: Synthetic probe
tataaaaaaacacaccttaaaattcataataaaacaatccaactctacca

SEQ ID NO: 3739 - DNA, 50 bp, Artificial Sequence
  Description of Artificial Sequence: Synthetic probe
caaaataaaattcataaaaacccttaatatctaaaaacaccaactaaaca

SEQ ID NO: 3740 - DNA, 50 bp, Artificial Sequence
  Description of Artificial Sequence: Synthetic probe
ttaggatgggatttataagagtttttggtgtttggaagtattaattgaat

SEQ ID NO: 3741 - DNA, 50 bp, Artificial Sequence
  Description of Artificial Sequence: Synthetic probe
aataaatctaaaaaacctcctatataatcatcataccacttcccaattca

SEQ ID NO: 3742 - DNA, 50 bp, Artificial Sequence
  Description of Artificial Sequence: Synthetic probe
ttcccatctttcatctcaaaactaactaaaaacataacttaaaataaaca

SEQ ID NO: 3743 - DNA, 50 bp, Artificial Sequence
  Description of Artificial Sequence: Synthetic probe
tgaaatatgatttggggaatgatatgaaattggtttaaaatataagagtt

SEQ ID NO: 3744 - DNA, 50 bp, Artificial Sequence
  Description of Artificial Sequence: Synthetic probe
tttttttatatttctactataaccattctaaaccaaaaacaaaaaattca

SEQ ID NO: 3745 - DNA, 50 bp, Artificial Sequence
  Description of Artificial Sequence: Synthetic probe
acaaactatcaatactaaaaacrcctactaaccaaaaaatacaaataaac

SEQ ID NO: 3746 - DNA, 50 bp, Artificial Sequence
  Description of Artificial Sequence: Synthetic probe
gagagatttagggattaattattaggttaagaaaggaagatgagaggttt

SEQ ID NO: 3747 - DNA, 50 bp, Artificial Sequence
  Description of Artificial Sequence: Synthetic probe
taaaacttaaaaacraacrtaataataccataaaccatctcaatctaaac

SEQ ID NO: 3748 - DNA, 50 bp, Artificial Sequence
  Description of Artificial Sequence: Synthetic probe
ctctaaatactaaacratcataacrctactaaatatatacraaacccccc

SEQ ID NO: 3749 - DNA, 50 bp, Artificial Sequence
  Description of Artificial Sequence: Synthetic probe
aaaaccatcacactaaaaaccracttctctactctcccrttataaaaatc

SEQ ID NO: 3750 - DNA, 50 bp, Artificial Sequence
  Description of Artificial Sequence: Synthetic probe
tcctaactaacttctaatcttctaattaaaactacrcctttaaataacac

SEQ ID NO: 3751 - DNA, 50 bp, Artificial Sequence
  Description of Artificial Sequence: Synthetic probe
aaaataaaccccrtaaaaaaattcaaaaactacrccctctccctaacrcc

SEQ ID NO: 3752 - DNA, 50 bp, Artificial Sequence
  Description of Artificial Sequence: Synthetic probe
cctaaaccaactacaacaaaatatacccrccrcrtataaaaaaaaacrac

SEQ ID NO: 3753 - DNA, 50 bp, Artificial Sequence
  Description of Artificial Sequence: Synthetic probe
crcccttcctaacrttactccctacttaactaaacactacraaatttcac

SEQ ID NO: 3754 - DNA, 50 bp, Artificial Sequence
  Description of Artificial Sequence: Synthetic probe
craaacttaccttattccraaaactaatctcataaaaaacccccraatcc

SEQ ID NO: 3755 - DNA, 50 bp, Artificial Sequence
  Description of Artificial Sequence: Synthetic probe
acrataaaataacttccccaatacaataacctaatactatccrcraaccc

SEQ ID NO: 3756 - DNA, 50 bp, Artificial Sequence
  Description of Artificial Sequence: Synthetic probe
ccctaccraaacttaccttattccraaaactaatctcataaaaaaccccc

SEQ ID NO: 3757 - DNA, 50 bp, Artificial Sequence
  Description of Artificial Sequence: Synthetic probe
accattaactacracactaaacttaaccctaccraaacttaccttattcc

SEQ ID NO: 3758 - DNA, 50 bp, Artificial Sequence
  Description of Artificial Sequence: Synthetic probe
aaccrctaaaccrtactctaactaaaaacctacraaatcctcaaaacaac

SEQ ID NO: 3759 - DNA, 50 bp, Artificial Sequence
  Description of Artificial Sequence: Synthetic probe
accaacaaaaaaaatatacraaacaacrcratccraaacaacacccaatc

SEQ ID NO: 3760 - DNA, 50 bp, Artificial Sequence
  Description of Artificial Sequence: Synthetic probe
acctccccraaacttctctcrcataactaaaaacaatactactacttctc

SEQ ID NO: 3761 - DNA, 50 bp, Artificial Sequence
  Description of Artificial Sequence: Synthetic probe
aacaaaaaaaatatacraaacaacrcratccraaacaacacccaatcrac

SEQ ID NO: 3762 - DNA, 50 bp, Artificial Sequence
  Description of Artificial Sequence: Synthetic probe
ccaaaacaaaaaccaaccaaccaatcttaaaactaccatctaccccaaac

SEQ ID NO: 3763 - DNA, 50 bp, Artificial Sequence
  Description of Artificial Sequence: Synthetic probe
tccctacccactcccatatacccactaaaaaaactttacttaaaataaac

SEQ ID NO: 3764 - DNA, 50 bp, Artificial Sequence
  Description of Artificial Sequence: Synthetic probe
aacttcaaattaaaaactattcctctctaacaaaaccrcccccaaaccac

SEQ ID NO: 3765 - DNA, 50 bp, Artificial Sequence
  Description of Artificial Sequence: Synthetic probe
aaaaaacaaaattaacttcaaattaaaaactattcctctctaacaaaacc

SEQ ID NO: 3766 - DNA, 50 bp, Artificial Sequence
  Description of Artificial Sequence: Synthetic probe
actaactaacttctactctaaactactaccaccactcrtaacttaaaaac

SEQ ID NO: 3767 - DNA, 50 bp, Artificial Sequence
  Description of Artificial Sequence: Synthetic probe
crtaaattactctaaccccaaaaaacrctcctctaaatatactttccrac

SEQ ID NO: 3768 - DNA, 50 bp, Artificial Sequence
  Description of Artificial Sequence: Synthetic probe
acttaaaattaaccctattctttaaccctctattcataataaatcratcc

SEQ ID NO: 3769 - DNA, 50 bp, Artificial Sequence
  Description of Artificial Sequence: Synthetic probe
taaaattaaccctattctttaaccctctattcataataaatcratccrtc

SEQ ID NO: 3770 - DNA, 50 bp, Artificial Sequence
  Description of Artificial Sequence: Synthetic probe
aggtygtaagttattttggttttaaaggaygtttttttgagtatgttttt

SEQ ID NO: 3771 - DNA, 50 bp, Artificial Sequence
  Description of Artificial Sequence: Synthetic probe
aaccrtaaattactctaaccccaaaaaacrctcctctaaatatactttcc

SEQ ID NO: 3772 - DNA, 50 bp, Artificial Sequence
  Description of Artificial Sequence: Synthetic probe
gattttttatttatgataagtyggttygtyggaaagtatatttagaggag

SEQ ID NO: 3773 - DNA, 50 bp, Artificial Sequence
  Description of Artificial Sequence: Synthetic probe
accctctattcataataaatcratccrtcraaaaacatactcaaaaaaac

SEQ ID NO: 3774 - DNA, 50 bp, Artificial Sequence
  Description of Artificial Sequence: Synthetic probe
taacaatcaactctaacctattactatataatctttaaaccaatcacttc

SEQ ID NO: 3775 - DNA, 50 bp, Artificial Sequence
  Description of Artificial Sequence: Synthetic probe
ttgatagttagttttggtttgttattgtgtaatttttgagttagttattt

SEQ ID NO: 3776 - DNA, 50 bp, Artificial Sequence
  Description of Artificial Sequence: Synthetic probe
aaaaaaaatctttaaaaatctatatccctccttcaccaccccrcctaaac

SEQ ID NO: 3777 - DNA, 50 bp, Artificial Sequence
  Description of Artificial Sequence: Synthetic probe
aaaaaaatctttaaaaatctatatccctccttcaccaccccacctaaaca

SEQ ID NO: 3778 - DNA, 50 bp, Artificial Sequence
  Description of Artificial Sequence: Synthetic probe
acaaaataaaatttaaaacrataattatattttccaacaaacrctcaaac

SEQ ID NO: 3779 - DNA, 50 bp, Artificial Sequence
  Description of Artificial Sequence: Synthetic probe
caaaataaaatttaaaacaataattatattttccaacaaacactcaaaca

SEQ ID NO: 3780 - DNA, 50 bp, Artificial Sequence
  Description of Artificial Sequence: Synthetic probe
ataaaataaaaaacaacaataacaataattctcatccctaaacctcctcc

SEQ ID NO: 3781 - DNA, 50 bp, Artificial Sequence
  Description of Artificial Sequence: Synthetic probe
taaaataaaaaacaacaataacaataattctcatccctaaacctcctcca

SEQ ID NO: 3782 - DNA, 50 bp, Artificial Sequence
  Description of Artificial Sequence: Synthetic probe
tatctcaaaaaaacactccaaataatatccttattcttcctattttcacc

SEQ ID NO: 3783 - DNA, 50 bp, Artificial Sequence
  Description of Artificial Sequence: Synthetic probe
atctcaaaaaaacactccaaataatatccttattcttcctattttcacca

SEQ ID NO: 3784 - DNA, 50 bp, Artificial Sequence
  Description of Artificial Sequence: Synthetic probe
aaaaataatacctaacaaaaaaaacaactaccaaacaccaaaaccacctc

SEQ ID NO: 3785 - DNA, 50 bp, Artificial Sequence
  Description of Artificial Sequence: Synthetic probe
accaaatctaaataacaactcaaaaacaacaaacttaaaaaataaaaaca

SEQ ID NO: 3786 - DNA, 50 bp, Artificial Sequence
  Description of Artificial Sequence: Synthetic probe
taatatctaacaactattttctctaccaaacaccaccctctaaacctcac

SEQ ID NO: 3787 - DNA, 50 bp, Artificial Sequence
  Description of Artificial Sequence: Synthetic probe
aatatctaacaactattttctctaccaaacaccaccctctaaacctcaca

SEQ ID NO: 3788 - DNA, 50 bp, Artificial Sequence
  Description of Artificial Sequence: Synthetic probe
gtttagtagaggtagaaatagattagatttaagtagtagtttagaggtag

SEQ ID NO: 3789 - DNA, 50 bp, Artificial Sequence
  Description of Artificial Sequence: Synthetic probe
tttagtagaggtagaaatagattagatttaagtagtagtttagaggtagt

SEQ ID NO: 3790 - DNA, 50 bp, Artificial Sequence
  Description of Artificial Sequence: Synthetic probe
tccaacaaaaataaaaacaaaccaaatctaaataacaactcaaaaacaac

SEQ ID NO: 3791 - DNA, 50 bp, Artificial Sequence
  Description of Artificial Sequence: Synthetic probe
ccaacaaaaataaaaacaaaccaaatctaaataacaactcaaaaacaaca

SEQ ID NO: 3792 - DNA, 50 bp, Artificial Sequence
  Description of Artificial Sequence: Synthetic probe
ttaaatctaatctatttctacctctactaaaccaaaaatttacattaaca

SEQ ID NO: 3793 - DNA, 50 bp, Artificial Sequence
  Description of Artificial Sequence: Synthetic probe
aaaaaaaacccttaattaaaaacrccratcttacaaaataaaataaaaac

SEQ ID NO: 3794 - DNA, 50 bp, Artificial Sequence
  Description of Artificial Sequence: Synthetic probe
rcttccaaccaaaaactctctcctctaaacctaaaacctacttaaaaatc

SEQ ID NO: 3795 - DNA, 50 bp, Artificial Sequence
  Description of Artificial Sequence: Synthetic probe
cttccaaccaaaaactctctcctctaaacctaaaacctacttaaaaatca

SEQ ID NO: 3796 - DNA, 50 bp, Artificial Sequence
  Description of Artificial Sequence: Synthetic probe
aaatataaaacccaaacatcaatctccacctaaacataaaaaaaatactc

SEQ ID NO: 3797 - DNA, 50 bp, Artificial Sequence
  Description of Artificial Sequence: Synthetic probe
aatataaaacccaaacatcaatctccacctaaacataaaaaaaatactca

SEQ ID NO: 3798 - DNA, 50 bp, Artificial Sequence
  Description of Artificial Sequence: Synthetic probe
taaaaatacaatccactcaataaaaacacatacaaccaaactaaaaaaca

SEQ ID NO: 3799 - DNA, 50 bp, Artificial Sequence
  Description of Artificial Sequence: Synthetic probe
aaaattaatatttaaatttcacatctcccaactctattaaatactatatc

SEQ ID NO: 3800 - DNA, 50 bp, Artificial Sequence
  Description of Artificial Sequence: Synthetic probe
aaattaatatttaaatttcacatctcccaactctattaaatactatatca

SEQ ID NO: 3801 - DNA, 50 bp, Artificial Sequence
  Description of Artificial Sequence: Synthetic probe
ttggagatatggtttatttaatggaggtatatataattaagttgagaaat

SEQ ID NO: 3802 - DNA, 50 bp, Artificial Sequence
  Description of Artificial Sequence: Synthetic probe
atactatatcrtttctcaacttaattatatatacctccattaaataaacc

SEQ ID NO: 3803 - DNA, 50 bp, Artificial Sequence
  Description of Artificial Sequence: Synthetic probe
tactatatcatttctcaacttaattatatatacctccattaaataaacca

SEQ ID NO: 3804 - DNA, 50 bp, Artificial Sequence
  Description of Artificial Sequence: Synthetic probe
actacattactaaatacatatttacraaaatctccaacacatctttacac

SEQ ID NO: 3805 - DNA, 50 bp, Artificial Sequence
  Description of Artificial Sequence: Synthetic probe
aaaataaaaaccaaaaactaatctataaaaaattcttttactcctcaaac

SEQ ID NO: 3806 - DNA, 50 bp, Artificial Sequence
  Description of Artificial Sequence: Synthetic probe
aaataaaaaccaaaaactaatctataaaaaattcttttactcctcaaaca

SEQ ID NO: 3807 - DNA, 50 bp, Artificial Sequence
  Description of Artificial Sequence: Synthetic probe
taaatacataataatcactatatatactacattactaaatacatatttac

SEQ ID NO: 3808 - DNA, 50 bp, Artificial Sequence
  Description of Artificial Sequence: Synthetic probe
aaatacataataatcactatatatactacattactaaatacatatttaca

SEQ ID NO: 3809 - DNA, 50 bp, Artificial Sequence
  Description of Artificial Sequence: Synthetic probe
taaaaaattcttttactcctcaaacrtataaaaatatattaaaaactctc

SEQ ID NO: 3810 - DNA, 50 bp, Artificial Sequence
  Description of Artificial Sequence: Synthetic probe
aaaaaattcttttactcctcaaacatataaaaatatattaaaaactctca

SEQ ID NO: 3811 - DNA, 50 bp, Artificial Sequence
  Description of Artificial Sequence: Synthetic probe
catatttcatacatcccaacaatcccaaaaaaaacctccaaatatataca

SEQ ID NO: 3812 - DNA, 50 bp, Artificial Sequence
  Description of Artificial Sequence: Synthetic probe
ttatatagttagtgtatagatagatgtaggttatatggagtttgaatttt

SEQ ID NO: 3813 - DNA, 50 bp, Artificial Sequence
  Description of Artificial Sequence: Synthetic probe
tcacataactaatacataaacaaatacaaattacataaaatctaaatccc

SEQ ID NO: 3814 - DNA, 50 bp, Artificial Sequence
  Description of Artificial Sequence: Synthetic probe
cacataactaatacataaacaaatacaaattacataaaatctaaatccca

SEQ ID NO: 3815 - DNA, 50 bp, Artificial Sequence
  Description of Artificial Sequence: Synthetic probe
taaattctaaatttaaatctcctttcctataaccaaataatcaataacca

SEQ ID NO: 3816 - DNA, 50 bp, Artificial Sequence
  Description of Artificial Sequence: Synthetic probe
ttttagttttgatgaggttatttaggaagtttgggattttgatttttgtt

SEQ ID NO: 3817 - DNA, 50 bp, Artificial Sequence
  Description of Artificial Sequence: Synthetic probe
ctcaatcttaataaaattactcaaaaaatctaaaatcttaatttttacca

SEQ ID NO: 3818 - DNA, 50 bp, Artificial Sequence
  Description of Artificial Sequence: Synthetic probe
caaaaacaaacactacractcaaaaccccaaaaataaatacctattatac

SEQ ID NO: 3819 - DNA, 50 bp, Artificial Sequence
  Description of Artificial Sequence: Synthetic probe
taaaaaacacaatcaccrtctcaaatctcaccctacaactacatccaaac

SEQ ID NO: 3820 - DNA, 50 bp, Artificial Sequence
  Description of Artificial Sequence: Synthetic probe
taaccrataacctctcccttaattacccaaaatataatccaaattttcac

SEQ ID NO: 3821 - DNA, 50 bp, Artificial Sequence
  Description of Artificial Sequence: Synthetic probe
aaaaaaaccaaaaactacraaaaaaaccrtaatacrcaaacrtccraacc

SEQ ID NO: 3822 - DNA, 50 bp, Artificial Sequence
  Description of Artificial Sequence: Synthetic probe
aaaaaccaaaaaaaccrcataacccaaacctatatcccraaacccaaaac

SEQ ID NO: 3823 - DNA, 50 bp, Artificial Sequence
  Description of Artificial Sequence: Synthetic probe
aaaaaactaaaaatataaacaaacaacaacrttataacrctctaaatttc

SEQ ID NO: 3824 - DNA, 50 bp, Artificial Sequence
  Description of Artificial Sequence: Synthetic probe
caaacattactctcrtttattccctacattccraaaaatcactacctccc

SEQ ID NO: 3825 - DNA, 50 bp, Artificial Sequence
  Description of Artificial Sequence: Synthetic probe
aaaaacaataacacaacaactttacaaaaaccttttcccctccccctaac

SEQ ID NO: 3826 - DNA, 50 bp, Artificial Sequence
  Description of Artificial Sequence: Synthetic probe
ttttttttagttagggattaggttttggtttttaaaagtataagyggttt

SEQ ID NO: 3827 - DNA, 50 bp, Artificial Sequence
  Description of Artificial Sequence: Synthetic probe
gtaaagttgttgtgttattgttttttatgttgtagttatttaaayggggt

SEQ ID NO: 3828 - DNA, 50 bp, Artificial Sequence
  Description of Artificial Sequence: Synthetic probe
cctcrccccraaaaaactcrtaaaaacctaaatccttaaactacaaccac

SEQ ID NO: 3829 - DNA, 50 bp, Artificial Sequence
  Description of Artificial Sequence: Synthetic probe
aaaaataacrtaattacaactcaaaaacctaaacccttacraacccttcc

SEQ ID NO: 3830 - DNA, 50 bp, Artificial Sequence
  Description of Artificial Sequence: Synthetic probe
aaataatcaacrtaaataaacaaatatacrataaaattccccctcrcccc

SEQ ID NO: 3831 - DNA, 50 bp, Artificial Sequence
  Description of Artificial Sequence: Synthetic probe
aaatcttaccrtatatttattcacctacrttaattatttttcccaaatac

SEQ ID NO: 3832 - DNA, 50 bp, Artificial Sequence
  Description of Artificial Sequence: Synthetic probe
aaaaataaaaaaatctcccccacccraaaaaacctaaactttaataaaac

SEQ ID NO: 3833 - DNA, 50 bp, Artificial Sequence
  Description of Artificial Sequence: Synthetic probe
cttaaatcatccctcccaaaacttactttttctactctaaaccraacrcc

SEQ ID NO: 3834 - DNA, 50 bp, Artificial Sequence
  Description of Artificial Sequence: Synthetic probe
atttaatcccaaaaaccacaaaaactaaaatacrtctcccaaatttacac

SEQ ID NO: 3835 - DNA, 50 bp, Artificial Sequence
  Description of Artificial Sequence: Synthetic probe
acaatattaccaaaatcttataatactccactccctccctcaaaccaaac

SEQ ID NO: 3836 - DNA, 50 bp, Artificial Sequence
  Description of Artificial Sequence: Synthetic probe
aatctttaaaactaaacaataataaataatattttactcrtctttccatc

SEQ ID NO: 3837 - DNA, 50 bp, Artificial Sequence
  Description of Artificial Sequence: Synthetic probe
gagtattataagattttggtaatattgttttagattgtggggtatgggaa

SEQ ID NO: 3838 - DNA, 50 bp, Artificial Sequence
  Description of Artificial Sequence: Synthetic probe
aatattataaaactctaacaacactattttaaactataaaacataaaaac

SEQ ID NO: 3839 - DNA, 50 bp, Artificial Sequence
  Description of Artificial Sequence: Synthetic probe
aaataacrtctttttcctcrtttcaaattcttcrctactactaccttacc

SEQ ID NO: 3840 - DNA, 50 bp, Artificial Sequence
  Description of Artificial Sequence: Synthetic probe
aatcaccaaacaaaaaaataccrcaaaaacccacaaaaaaataacaaccc

SEQ ID NO: 3841 - DNA, 50 bp, Artificial Sequence
  Description of Artificial Sequence: Synthetic probe
tccctaaaatcracraaccacaactcaaccaattaacttaaaaatataac

SEQ ID NO: 3842 - DNA, 50 bp, Artificial Sequence
  Description of Artificial Sequence: Synthetic probe
acractaaccaataaaaaaaactcccrcraaaaaatattccttccccttc

SEQ ID NO: 3843 - DNA, 50 bp, Artificial Sequence
  Description of Artificial Sequence: Synthetic probe
ctctaaaacraactaaaaaattctacctaccratacaaaaccttcraatc

SEQ ID NO: 3844 - DNA, 50 bp, Artificial Sequence
  Description of Artificial Sequence: Synthetic probe
cctcaaaaaaatttcaaaaataaaaacracractccctaaaccacttttc

SEQ ID NO: 3845 - DNA, 50 bp, Artificial Sequence
  Description of Artificial Sequence: Synthetic probe
craaaacaatctctttaaaacctctcraaaaactccraacaacttaacrc

SEQ ID NO: 3846 - DNA, 50 bp, Artificial Sequence
  Description of Artificial Sequence: Synthetic probe
aaaacccaaaaaaaacracctccccccaacttaacraattatactaaacc

SEQ ID NO: 3847 - DNA, 50 bp, Artificial Sequence
  Description of Artificial Sequence: Synthetic probe
tcrcraaaacrtacttattataaaaaatcacrttttacaacatcttaacc

SEQ ID NO: 3848 - DNA, 50 bp, Artificial Sequence
  Description of Artificial Sequence: Synthetic probe
tccrcractaaaaacaacrccrattccttacratcaaaatactacaaaac

SEQ ID NO: 3849 - DNA, 50 bp, Artificial Sequence
  Description of Artificial Sequence: Synthetic probe
acratcaaaatactacaaaacrtaactccccacaataaatacrtttccrc

SEQ ID NO: 3850 - DNA, 50 bp, Artificial Sequence
  Description of Artificial Sequence: Synthetic probe
caaaatactacaaaacrtaactccccacaataaatacrtttccrcraacc

SEQ ID NO: 3851 - DNA, 50 bp, Artificial Sequence
  Description of Artificial Sequence: Synthetic probe
caaaataataataaaaactctataaaaacatcaattcrcataaccattcc

SEQ ID NO: 3852 - DNA, 50 bp, Artificial Sequence
  Description of Artificial Sequence: Synthetic probe
aatatctctactcaccrataaacccaatttaacaacatccacaaactacc

SEQ ID NO: 3853 - DNA, 50 bp, Artificial Sequence
  Description of Artificial Sequence: Synthetic probe
aaatcaaaaccacaaaaaaataaatacttataaaaaaactaccratcccc

SEQ ID NO: 3854 - DNA, 50 bp, Artificial Sequence
  Description of Artificial Sequence: Synthetic probe
cacatcactatattcaataataccatctaaaatcaaatttttaaaactcc

SEQ ID NO: 3855 - DNA, 50 bp, Artificial Sequence
  Description of Artificial Sequence: Synthetic probe
tataaagtttaaattttttgttattgaaggtgttatttaggtagggtagt

SEQ ID NO: 3856 - DNA, 50 bp, Artificial Sequence
  Description of Artificial Sequence: Synthetic probe
caaaaaaaacracaaacacctaataaacactaataacactaccctaaaac

SEQ ID NO: 3857 - DNA, 50 bp, Artificial Sequence
  Description of Artificial Sequence: Synthetic probe
accaaaataactataaatataaaaataataatatctactttccrctttac

SEQ ID NO: 3858 - DNA, 50 bp, Artificial Sequence
  Description of Artificial Sequence: Synthetic probe
tcctaattctccaactaaccctcctaaaaatcttaaacctaaaacaacac

SEQ ID NO: 3859 - DNA, 50 bp, Artificial Sequence
  Description of Artificial Sequence: Synthetic probe
atcaaacaaatctttacrtaaaaacttaataaaacraccactctctctac

SEQ ID NO: 3860 - DNA, 50 bp, Artificial Sequence
  Description of Artificial Sequence: Synthetic probe
taaccctcctaaaaatcttaaacctaaaacaacacracttccccctatac

SEQ ID NO: 3861 - DNA, 50 bp, Artificial Sequence
  Description of Artificial Sequence: Synthetic probe
ttcttaaattaaaataaacraaataccctaaaccccttatcatcttcatc

SEQ ID NO: 3862 - DNA, 50 bp, Artificial Sequence
  Description of Artificial Sequence: Synthetic probe
cccaaaaaccatcccctcaaaccctatctataataaaatctatcttccac

SEQ ID NO: 3863 - DNA, 50 bp, Artificial Sequence
  Description of Artificial Sequence: Synthetic probe
ttaatttaaaacaacaaacaaactatataacccaaaaaacaaatctaatc

SEQ ID NO: 3864 - DNA, 50 bp, Artificial Sequence
  Description of Artificial Sequence: Synthetic probe
atatgaagatggttgtgttttaaaaagattttatttgtaaagataygtgg

SEQ ID NO: 3865 - DNA, 50 bp, Artificial Sequence
  Description of Artificial Sequence: Synthetic probe
taatttacctattactctaaatcaataaatctaaacttatttttcataac

SEQ ID NO: 3866 - DNA, 50 bp, Artificial Sequence
  Description of Artificial Sequence: Synthetic probe
tttactcractataaataaacaataacatatctttaaaaaaacaatatac

SEQ ID NO: 3867 - DNA, 50 bp, Artificial Sequence
  Description of Artificial Sequence: Synthetic probe
gtaagaggtgggttattgggatattgtatagtgaaatagagtattttgtt

SEQ ID NO: 3868 - DNA, 50 bp, Artificial Sequence
  Description of Artificial Sequence: Synthetic probe
taaaaaataaactactaaaacactatataataaaacaaaacattttactc

SEQ ID NO: 3869 - DNA, 50 bp, Artificial Sequence
  Description of Artificial Sequence: Synthetic probe
atatccrcrataaaaaaactccaatcrtcacaccrcaaactaaaaattac

SEQ ID NO: 3870 - DNA, 50 bp, Artificial Sequence
  Description of Artificial Sequence: Synthetic probe
acaaaccrtatccacrtaaatacacacaaattcrataaacractcraaac

SEQ ID NO: 3871 - DNA, 50 bp, Artificial Sequence
  Description of Artificial Sequence: Synthetic probe
acccraaaccttaaaaactataaaatcattccaaatcccraacctccctc

SEQ ID NO: 3872 - DNA, 50 bp, Artificial Sequence
  Description of Artificial Sequence: Synthetic probe
aataaccctaccctaaaccacaaatataaacaacaccatcaataacacca

SEQ ID NO: 3873 - DNA, 50 bp, Artificial Sequence
  Description of Artificial Sequence: Synthetic probe
atcccctaaaaattattccctaaaccaaaccctccaaaaataacaattca

SEQ ID NO: 3874 - DNA, 50 bp, Artificial Sequence
  Description of Artificial Sequence: Synthetic probe
atactactcacatctataatccaaaacaaaaccactccaaataaaaacca

SEQ ID NO: 3875 - DNA, 50 bp, Artificial Sequence
  Description of Artificial Sequence: Synthetic probe
taaaactctctacctaaatcccctccaaactaaatacaaacataaacaca

SEQ ID NO: 3876 - DNA, 50 bp, Artificial Sequence
  Description of Artificial Sequence: Synthetic probe
taataaacaattaaattaattccaaatctttactattataaataatacca

SEQ ID NO: 3877 - DNA, 50 bp, Artificial Sequence
  Description of Artificial Sequence: Synthetic probe
aaaattaccacactatcttaaaataccatctcacaccaattaaaataaca

SEQ ID NO: 3878 - DNA, 50 bp, Artificial Sequence
  Description of Artificial Sequence: Synthetic probe
tccctcatcccacataacaactctacctataaaataaaaacrctacatcc

SEQ ID NO: 3879 - DNA, 50 bp, Artificial Sequence
  Description of Artificial Sequence: Synthetic probe
ccctcatcccacataacaactctacctataaaataaaaacactacatcca

SEQ ID NO: 3880 - DNA, 50 bp, Artificial Sequence
  Description of Artificial Sequence: Synthetic probe
ccaacactatccctcatcccacataacaactctacctataaaataaaaac

SEQ ID NO: 3881 - DNA, 50 bp, Artificial Sequence
  Description of Artificial Sequence: Synthetic probe
caacactatccctcatcccacataacaactctacctataaaataaaaaca

SEQ ID NO: 3882 - DNA, 50 bp, Artificial Sequence
  Description of Artificial Sequence: Synthetic probe
ataactccaactctccctccaacaaattttaattaaacattcattctaca

SEQ ID NO: 3883 - DNA, 50 bp, Artificial Sequence
  Description of Artificial Sequence: Synthetic probe
caataaaaccatataacaaaaactaaaaataaattactaaaactccctac

SEQ ID NO: 3884 - DNA, 50 bp, Artificial Sequence
  Description of Artificial Sequence: Synthetic probe
aataaaaccatataacaaaaactaaaaataaattactaaaactccctaca

SEQ ID NO: 3885 - DNA, 50 bp, Artificial Sequence
  Description of Artificial Sequence: Synthetic probe
caattaaattacccaaaacacratttaaaaccactaatctaaataaattc

SEQ ID NO: 3886 - DNA, 50 bp, Artificial Sequence
  Description of Artificial Sequence: Synthetic probe
aattaaattacccaaaacacaatttaaaaccactaatctaaataaattca

SEQ ID NO: 3887 - DNA, 50 bp, Artificial Sequence
  Description of Artificial Sequence: Synthetic probe
ctaacccttaaaccttctacraaccctactattaaaacctctaaatttcc

SEQ ID NO: 3888 - DNA, 50 bp, Artificial Sequence
  Description of Artificial Sequence: Synthetic probe
taacccttaaaccttctacaaaccctactattaaaacctctaaatttcca

SEQ ID NO: 3889 - DNA, 50 bp, Artificial Sequence
  Description of Artificial Sequence: Synthetic probe
ttcataaaacaccaatcaaactaaaatatcaaaattaaacataactaaca

SEQ ID NO: 3890 - DNA, 50 bp, Artificial Sequence
  Description of Artificial Sequence: Synthetic probe
aaaactaaaaatactactaatatacaacaaatcttactatactaaaatca

SEQ ID NO: 3891 - DNA, 50 bp, Artificial Sequence
  Description of Artificial Sequence: Synthetic probe
caaaatttcctccaaaactacaaaatcatcataaaaaaaatcacccaacc

SEQ ID NO: 3892 - DNA, 50 bp, Artificial Sequence
  Description of Artificial Sequence: Synthetic probe
aaaatttcctccaaaactacaaaatcatcataaaaaaaatcacccaacca

SEQ ID NO: 3893 - DNA, 50 bp, Artificial Sequence
  Description of Artificial Sequence: Synthetic probe
attttcttaactatacaccctaatactaaaattaataactctaataacca

SEQ ID NO: 3894 - DNA, 50 bp, Artificial Sequence
  Description of Artificial Sequence: Synthetic probe
ttagtattagggtgtatagttaagaaaatgagtagaaagtttatgtttat

SEQ ID NO: 3895 - DNA, 50 bp, Artificial Sequence
  Description of Artificial Sequence: Synthetic probe
aaacacaacacttcctaaaaaaatacatctacaaccaaaaaaaattcaca

SEQ ID NO: 3896 - DNA, 50 bp, Artificial Sequence
  Description of Artificial Sequence: Synthetic probe
ccaaaacacaaaaacaaccaaattaacctaaaaaaccttaataccaaaca

SEQ ID NO: 3897 - DNA, 50 bp, Artificial Sequence
  Description of Artificial Sequence: Synthetic probe
aaaaattcataaaaaaaacccatctaaaacttatcaaaaaaacaaacaca

SEQ ID NO: 3898 - DNA, 50 bp, Artificial Sequence
  Description of Artificial Sequence: Synthetic probe
tccttttttcaccccacatacaatcaactaccaaacctaataaaatccca

SEQ ID NO: 3899 - DNA, 50 bp, Artificial Sequence
  Description of Artificial Sequence: Synthetic probe
caaacttttctatcttaaccaaatcacaactatccaattcccaaaatcca

SEQ ID NO: 3900 - DNA, 50 bp, Artificial Sequence
  Description of Artificial Sequence: Synthetic probe
acatcctcctcaaaactaaaataaattttacttatcttaaattccccaca

SEQ ID NO: 3901 - DNA, 50 bp, Artificial Sequence
  Description of Artificial Sequence: Synthetic probe
ttttttgaaggaaaaagatgaatgaattgagatattgttttgtgatagtt

SEQ ID NO: 3902 - DNA, 50 bp, Artificial Sequence
  Description of Artificial Sequence: Synthetic probe
ttatcttaaattccccacaactatcacaaaacaatatctcaattcattca

SEQ ID NO: 3903 - DNA, 50 bp, Artificial Sequence
  Description of Artificial Sequence: Synthetic probe
taaactaaatcaaaaataaaaccattaaatatcaaaccttaactccaaca

SEQ ID NO: 3904 - DNA, 50 bp, Artificial Sequence
  Description of Artificial Sequence: Synthetic probe
ttaacaaaaacaaatcaacctaaaaccacatcaataacctccaaaataca

SEQ ID NO: 3905 - DNA, 50 bp, Artificial Sequence
  Description of Artificial Sequence: Synthetic probe
ttgaattgggttagaaatgaggttattgggtattaggttttaattttagt

SEQ ID NO: 3906 - DNA, 50 bp, Artificial Sequence
  Description of Artificial Sequence: Synthetic probe
aaataaaaattatatatcaattcaaaactatacttttacctaacccaaca

SEQ ID NO: 3907 - DNA, 50 bp, Artificial Sequence
  Description of Artificial Sequence: Synthetic probe
caattctttcctttctacttcctaaaaaacacaaataccctaacataaca

SEQ ID NO: 3908 - DNA, 50 bp, Artificial Sequence
  Description of Artificial Sequence: Synthetic probe
ggagtaagggttgtgtgttagtttaagattgtatttttatttggtttagt

SEQ ID NO: 3909 - DNA, 50 bp, Artificial Sequence
  Description of Artificial Sequence: Synthetic probe
aaaaaaacaacacctaatcatctataaaaccttcataaaacctaaaaaca

SEQ ID NO: 3910 - DNA, 50 bp, Artificial Sequence
  Description of Artificial Sequence: Synthetic probe
cttaaataataaaaatcccatcctttttcaaattcctcctctatactaca

SEQ ID NO: 3911 - DNA, 50 bp, Artificial Sequence
  Description of Artificial Sequence: Synthetic probe
tgaatatgtttaagaaataataatttgggtagatgtagtggtttaggttt

SEQ ID NO: 3912 - DNA, 50 bp, Artificial Sequence
  Description of Artificial Sequence: Synthetic probe
aaacatacctaaaaaataataatctaaacaaatacaataactcaaaccca

SEQ ID NO: 3913 - DNA, 50 bp, Artificial Sequence
  Description of Artificial Sequence: Synthetic probe
taaacaaatacaataactcaaacccataatcccaaccctttaaaaaacca

SEQ ID NO: 3914 - DNA, 50 bp, Artificial Sequence
  Description of Artificial Sequence: Synthetic probe
ttccttccttccttccttccttccttccttttttttaaaacataatctca

SEQ ID NO: 3915 - DNA, 50 bp, Artificial Sequence
  Description of Artificial Sequence: Synthetic probe
ttaataaacacaaccccaactatttcctcctatccattcaaaaaccatca

SEQ ID NO: 3916 - DNA, 50 bp, Artificial Sequence
  Description of Artificial Sequence: Synthetic probe
ctacttatctaccacataacaaatttctacccaaacaacattcaaatcca

SEQ ID NO: 3917 - DNA, 50 bp, Artificial Sequence; identical to SEQ ID NO: 3916
  Description of Artificial Sequence: Synthetic probe

SEQ ID NO: 3918 - DNA, 50 bp, Artificial Sequence; identical to SEQ ID NO: 3916
  Description of Artificial Sequence: Synthetic probe

SEQ ID NO: 3919 - DNA, 50 bp, Artificial Sequence; identical to SEQ ID NO: 3916
  Description of Artificial Sequence: Synthetic probe

SEQ ID NO: 3920 - DNA, 50 bp, Artificial Sequence
  Description of Artificial Sequence: Synthetic probe
ccaaaatctaaaaaatccaatctccattacaaatcaaattaataaacaca

SEQ ID NO: 3921 - DNA, 50 bp, Artificial Sequence; identical to SEQ ID NO: 3920
  Description of Artificial Sequence: Synthetic probe

SEQ ID NO: 3922 - DNA, 50 bp, Artificial Sequence
  Description of Artificial Sequence: Synthetic probe
tcttcaaaaataaaatctaaaaaatcatcaaaaactcactccactccaca

SEQ ID NO: 3923 - DNA, 50 bp, Artificial Sequence
  Description of Artificial Sequence: Synthetic probe
tatctacacctaccaaataaaacacaccaacctaaataatcctatcacca

SEQ ID NO: 3924 - DNA, 50 bp, Artificial Sequence
  Description of Artificial Sequence: Synthetic probe
ttcataattctcccccttatcaaaaaatctaaaaacactaactaatctca

SEQ ID NO: 3925 - DNA, 50 bp, Artificial Sequence
  Description of Artificial Sequence: Synthetic probe
caaatataaaaataactctttctaaatttcctcttaacaaactttttcca

SEQ ID NO: 3926 - DNA, 50 bp, Artificial Sequence
  Description of Artificial Sequence: Synthetic probe
ctaaaattctaaaacctaatacaacatatcaaaataaaaacaatacaaca

SEQ ID NO: 3927 - DNA, 50 bp, Artificial Sequence
  Description of Artificial Sequence: Synthetic probe
atccctactcatatcctatctaaaattctaaaacctaatacaacatatca

SEQ ID NO: 3928 - DNA, 50 bp, Artificial Sequence
  Description of Artificial Sequence: Synthetic probe
ttctaaatttcctcttaacaaactttttccactacactatcctcatccca

SEQ ID NO: 3929 - DNA, 50 bp, Artificial Sequence
  Description of Artificial Sequence: Synthetic probe
aattttttattgtggaataagtgtgaatatgttaggggaaggtaagtttt

SEQ ID NO: 3930 - DNA, 50 bp, Artificial Sequence
  Description of Artificial Sequence: Synthetic probe
aataacctctaaaactttctaacatttcttttctatcaaacccctcatca

SEQ ID NO: 3931 - DNA, 50 bp, Artificial Sequence
  Description of Artificial Sequence: Synthetic probe
caaaataaacaaaacttaccttcccctaacatattcacacttattccaca

SEQ ID NO: 3932 - DNA, 50 bp, Artificial Sequence
  Description of Artificial Sequence: Synthetic probe
acctcatacatctaactacattaaaatcccaacctaaaatccctctctca

SEQ ID NO: 3933 - DNA, 50 bp, Artificial Sequence
  Description of Artificial Sequence: Synthetic probe
ctaaaaaccactaatatcaaataatcaaaaaacaaacataacctataaca

SEQ ID NO: 3934 - DNA, 50 bp, Artificial Sequence
  Description of Artificial Sequence: Synthetic probe
aatcttaatacaaccaaatacataaaatcccaaatactcaaactcctaca

SEQ ID NO: 3935 - DNA, 50 bp, Artificial Sequence
  Description of Artificial Sequence: Synthetic probe
ggattttaatgtagttagatgtatgaggttttaagtatttaggtttttgt

SEQ ID NO: 3936 - DNA, 50 bp, Artificial Sequence
  Description of Artificial Sequence: Synthetic probe
tttctctaattatctaaaataatttcaataactaattatataacctttca

SEQ ID NO: 3937 - DNA, 50 bp, Artificial Sequence
  Description of Artificial Sequence: Synthetic probe
ttattgttgaaggaagtagagattaattttgttatttattagtttgagat

SEQ ID NO: 3938 - DNA, 50 bp, Artificial Sequence
  Description of Artificial Sequence: Synthetic probe
actcactaaaaaaactattataccttaaaaaaaacatttactatatttca

SEQ ID NO: 3939 - DNA, 50 bp, Artificial Sequence
  Description of Artificial Sequence: Synthetic probe
caatatccaatttaaaaattaaaaatctatcctaaaaccaaatactaaca

SEQ ID NO: 3940 - DNA, 50 bp, Artificial Sequence
  Description of Artificial Sequence: Synthetic probe
agtttattgaaaagattattgtgttttaggaaaagtatttgttgtgtttt

SEQ ID NO: 3941 - DNA, 50 bp, Artificial Sequence
  Description of Artificial Sequence: Synthetic probe
aataaatggtgttgggataattggttatttatatgtaggagaatgaaatt

SEQ ID NO: 3942 - DNA, 50 bp, Artificial Sequence
  Description of Artificial Sequence: Synthetic probe
aacaccatttattaaaaaaaatatctttccccaccatatatttttattca

SEQ ID NO: 3943 - DNA, 50 bp, Artificial Sequence
  Description of Artificial Sequence: Synthetic probe
acccaaaaataaacccaaatacttacaaccaactaatcttcaacaaaaca

SEQ ID NO: 3944 - DNA, 50 bp, Artificial Sequence
  Description of Artificial Sequence: Synthetic probe
ttattaaaaaaaatatctttccccaccatatatttttattcactttatca

SEQ ID NO: 3945 - DNA, 50 bp, Artificial Sequence
  Description of Artificial Sequence: Synthetic probe
caaaaaatattactccttaatttaaaaacctataaatataatcctataca

SEQ ID NO: 3946 - DNA, 50 bp, Artificial Sequence
  Description of Artificial Sequence: Synthetic probe
ataaacaaataataccacttttacattttctttattaaattaaaaaatca

SEQ ID NO: 3947 - DNA, 50 bp, Artificial Sequence
  Description of Artificial Sequence: Synthetic probe
aatataacctacctttacaacaaaactcttaaaatcaaattaaatcaaca

SEQ ID NO: 3948 - DNA, 50 bp, Artificial Sequence
  Description of Artificial Sequence: Synthetic probe
cattcactatataatttttaatctcatttttccaaaacaattacaaatcc

SEQ ID NO: 3949 - DNA, 50 bp, Artificial Sequence
  Description of Artificial Sequence: Synthetic probe
cccaaaactaaaaataaaacctaaaatctattttacctttattcaaaacc

SEQ ID NO: 3950 - DNA, 50 bp, Artificial Sequence
  Description of Artificial Sequence: Synthetic probe
ccaaaactaaaaataaaacctaaaatctattttacctttattcaaaacca

SEQ ID NO: 3951 - DNA, 50 bp, Artificial Sequence
  Description of Artificial Sequence: Synthetic probe
tatagatatgtgggaggaagaaaatatgaatgtgtattaatttgaagtat

SEQ ID NO: 3952 - DNA, 50 bp, Artificial Sequence
  Description of Artificial Sequence: Synthetic probe
aattctcaacacccctataactacaaatacaatttatccaccctttccca

SEQ ID NO: 3953 - DNA, 50 bp, Artificial Sequence
  Description of Artificial Sequence: Synthetic probe
ttttaattaaacattcattctacacaaaaaactctaataacccaccctca

SEQ ID NO: 3954 - DNA, 50 bp, Artificial Sequence
  Description of Artificial Sequence: Synthetic probe
tcaaaaacaaaaaaatattacctccaaaaatctaattttttcacctacca

SEQ ID NO: 3955 - DNA, 50 bp, Artificial Sequence
  Description of Artificial Sequence: Synthetic probe
atggagagttagaaggttgttttttgtttaagataatttagtaattagtt

SEQ ID NO: 3956 - DNA, 50 bp, Artificial Sequence
  Description of Artificial Sequence: Synthetic probe
gggtaagaaaaggaatatgttataggtagggattttagtttttgtattat

SEQ ID NO: 3957 - DNA, 50 bp, Artificial Sequence
  Description of Artificial Sequence: Synthetic probe
tcattaattttcaaattatactctaaataactcaattatcaaaaattcca

SEQ ID NO: 3958 - DNA, 50 bp, Artificial Sequence
  Description of Artificial Sequence: Synthetic probe
ccaatatcatctctaaaacaaaatcccaaaactttaaatatcttaaccca

SEQ ID NO: 3959 - DNA, 50 bp, Artificial Sequence
  Description of Artificial Sequence: Synthetic probe
tttaaagttttgggattttgttttagagatgatattggaaattataggtt

SEQ ID NO: 3960 - DNA, 50 bp, Artificial Sequence
  Description of Artificial Sequence: Synthetic probe
ctaaaatcctaaaatcttaccttaaaaataacactaaaaactacaaacca

SEQ ID NO: 3961 - DNA, 50 bp, Artificial Sequence
  Description of Artificial Sequence: Synthetic probe
ctaaaatcttaccttaaaaataacactaaaaactacaaaccaaatctaca

SEQ ID NO: 3962 - DNA, 50 bp, Artificial Sequence
  Description of Artificial Sequence: Synthetic probe
attttgttttagagatgatattggaaattataggttgagtttatggtgtt

SEQ ID NO: 3963 - DNA, 50 bp, Artificial Sequence
  Description of Artificial Sequence: Synthetic probe
tcttaccttaaaaataacactaaaaactacaaaccaaatctacaatacca

SEQ ID NO: 3964 - DNA, 50 bp, Artificial Sequence
  Description of Artificial Sequence: Synthetic probe
cttcaaaaaattttaaaaaatacatttctaaccaaatacaataactcaca

SEQ ID NO: 3965 - DNA, 50 bp, Artificial Sequence
  Description of Artificial Sequence: Synthetic probe
taaccaaatacaataactcacacctataatctcaacactttaaataacca

SEQ ID NO: 3966 - DNA, 50 bp, Artificial Sequence
  Description of Artificial Sequence: Synthetic probe
caacataataaaaccccatctctactaaacatacaaaaattatctaaaca

SEQ ID NO: 3967 - DNA, 50 bp, Artificial Sequence
  Description of Artificial Sequence: Synthetic probe
taaaaccccatctctactaaacatacaaaaattatctaaacataataaca

SEQ ID NO: 3968 - DNA, 50 bp, Artificial Sequence
  Description of Artificial Sequence: Synthetic probe
tccatctaccaaaaacaacaaaaatactatacattcaataaaactcaaca

SEQ ID NO: 3969 - DNA, 50 bp, Artificial Sequence
  Description of Artificial Sequence: Synthetic probe
tcaaaatacacatattcctcccaattataaataaacccatccacaacaca

SEQ ID NO: 3970 - DNA, 50 bp, Artificial Sequence
  Description of Artificial Sequence: Synthetic probe
ttccattccataaaatccttctaactattaaaatactcacctataaacca

SEQ ID NO: 3971 - DNA, 50 bp, Artificial Sequence
  Description of Artificial Sequence: Synthetic probe
cattttaacaacacaataaaaaaattcctaacaataataaaactaaaaca

SEQ ID NO: 3972 - DNA, 50 bp, Artificial Sequence
  Description of Artificial Sequence: Synthetic probe
aaaatatacaaacacaaatacaaactaataaaaccactcatccaacaaca

SEQ ID NO: 3973 - DNA, 50 bp, Artificial Sequence
  Description of Artificial Sequence: Synthetic probe
atatacaaacacaaatacaaactaataaaaccactcatccaacaacacca

SEQ ID NO: 3974 - DNA, 50 bp, Artificial Sequence
  Description of Artificial Sequence: Synthetic probe
gtttggtttttatggttgttttaggagttttggtttatagtttttatttt

SEQ ID NO: 3975 - DNA, 50 bp, Artificial Sequence
  Description of Artificial Sequence: Synthetic probe
accaaaataaaaactataaaccaaaactcctaaaacaaccataaaaacca

SEQ ID NO: 3976 - DNA, 50 bp, Artificial Sequence
  Description of Artificial Sequence: Synthetic probe
taaacactatataaatcaatcaccacctcctcaacctctatacaaaacca

SEQ ID NO: 3977 - DNA, 50 bp, Artificial Sequence
  Description of Artificial Sequence: Synthetic probe
cccacaaaaaaactaactctcccaccctaatcttttattattcaaataca

SEQ ID NO: 3978 - DNA, 50 bp, Artificial Sequence
  Description of Artificial Sequence: Synthetic probe
caaataaaaccacatatacaaatatcctatccaccaccaattaaaaacca

SEQ ID NO: 3979 - DNA, 50 bp, Artificial Sequence
  Description of Artificial Sequence: Synthetic probe
atacctatacatataattttacctaaaaactaccataacacctataaaca

SEQ ID NO: 3980 - DNA, 50 bp, Artificial Sequence
  Description of Artificial Sequence: Synthetic probe
tcaaatacatccaatataacaattcccactctcttttccttatcaccaca

SEQ ID NO: 3981 - DNA, 50 bp, Artificial Sequence
  Description of Artificial Sequence: Synthetic probe
gatatttgtatatgtggttttatttggaggttgttatgatatttgtaaat

SEQ ID NO: 3982 - DNA, 50 bp, Artificial Sequence
  Description of Artificial Sequence: Synthetic probe
tatgtaaatgttggtagttgtatttggaagttaggtatatttaatatggt

SEQ ID NO: 3983 - DNA, 50 bp, Artificial Sequence
  Description of Artificial Sequence: Synthetic probe
atataaatactaacaactatacctaaaaatcaaatacatccaatataaca

SEQ ID NO: 3984 - DNA, 50 bp, Artificial Sequence
  Description of Artificial Sequence: Synthetic probe
aaccaaaaaaaatcatcatccaacaccccctaacaacaattataattaca

SEQ ID NO: 3985 - DNA, 50 bp, Artificial Sequence
  Description of Artificial Sequence: Synthetic probe
ttcctccctcaaaaaacataaccataactactattaaaaaatattaaaca

SEQ ID NO: 3986 - DNA, 50 bp, Artificial Sequence
  Description of Artificial Sequence: Synthetic probe
aaaatattaaacaacaattctttctaactacttcctactaaaaaaaaaca

SEQ ID NO: 3987 - DNA, 50 bp, Artificial Sequence
  Description of Artificial Sequence: Synthetic probe
aaacaacaattctttctaactacttcctactaaaaaaaaacatcatatca

SEQ ID NO: 3988 - DNA, 50 bp, Artificial Sequence
  Description of Artificial Sequence: Synthetic probe
acctattacaccaataaattataatactaatttatctccactaaatatca

SEQ ID NO: 3989 - DNA, 50 bp, Artificial Sequence
  Description of Artificial Sequence: Synthetic probe
tataatactaatttatctccactaaatatcactatacattaccaaaaaca

SEQ ID NO: 3990 - DNA, 50 bp, Artificial Sequence
  Description of Artificial Sequence: Synthetic probe
attctattacaaataacaacataataataacaattcccacaaaaataaca

SEQ ID NO: 3991 - DNA, 50 bp, Artificial Sequence
  Description of Artificial Sequence: Synthetic probe
gttgaaaattataaaaggtaagtaaatgagtgagggttatttgttttagt

SEQ ID NO: 3992 - DNA, 50 bp, Artificial Sequence
  Description of Artificial Sequence: Synthetic probe
gattttaagttgaaaattataaaaggtaagtaaatgagtgagggttattt

SEQ ID NO: 3993 - DNA, 50 bp, Artificial Sequence
  Description of Artificial Sequence: Synthetic probe
caacaaaaaaacctcaaaacattaacacacttcaaacccttttaatctca

SEQ ID NO: 3994 - DNA, 50 bp, Artificial Sequence
  Description of Artificial Sequence: Synthetic probe
tcatctattcctctttaatattccctataatacattactactatttttca

SEQ ID NO: 3995 - DNA, 50 bp, Artificial Sequence
  Description of Artificial Sequence: Synthetic probe
aaatatcaccaaaaaattaacaaattattatcctcaattttcctttcaca

SEQ ID NO: 3996 - DNA, 50 bp, Artificial Sequence
  Description of Artificial Sequence: Synthetic probe
attatttcctaaaattaatttaaaaacttttttaactaataaaaccacca

SEQ ID NO: 3997 - DNA, 50 bp, Artificial Sequence
  Description of Artificial Sequence: Synthetic probe
aaaaaaaatattaaaataaaatttttcctaaaacaccccttacactcaca

SEQ ID NO: 3998 - DNA, 50 bp, Artificial Sequence
  Description of Artificial Sequence: Synthetic probe
tatccaacctataataaaaaccactaaaaatcaaactacccccaaaaaca

SEQ ID NO: 3999 - DNA, 50 bp, Artificial Sequence
  Description of Artificial Sequence: Synthetic probe
caatcctactaaaccatctataaaactaattctaactccaataacctcca

SEQ ID NO: 4000 - DNA, 50 bp, Artificial Sequence
  Description of Artificial Sequence: Synthetic probe
ttatttagtttgtggtggagattattggaaattaaattgtttttggagat

SEQ ID NO: 4001 - DNA, 50 bp, Artificial Sequence
  Description of Artificial Sequence: Synthetic probe
aaataaccaccctcaaaaaattccccaaaatactatctaatcctataaca

SEQ ID NO: 4002 - DNA, 50 bp, Artificial Sequence
  Description of Artificial Sequence: Synthetic probe
tgatagagatagtgattaataaatattgagggaatttagagattagagtt

SEQ ID NO: 4003 - DNA, 50 bp, Artificial Sequence
  Description of Artificial Sequence: Synthetic probe
aataaacaacaatattaccaccaacatatctcacctccaaccataaaaca

SEQ ID NO: 4004 - DNA, 50 bp, Artificial Sequence
  Description of Artificial Sequence: Synthetic probe
caactttctcctatctcaataaataaaatatataatcaaattttacacca

SEQ ID NO: 4005 - DNA, 50 bp, Artificial Sequence
  Description of Artificial Sequence: Synthetic probe
aaaaaaacccttaaacaatacccaaactttcttaaacaaaaatccctaca

SEQ ID NO: 4006 - DNA, 50 bp, Artificial Sequence
  Description of Artificial Sequence: Synthetic probe
gtgtttgtaggtagtatgtttggtgaaagttattgttattttttagtttt

SEQ ID NO: 4007 - DNA, 50 bp, Artificial Sequence
  Description of Artificial Sequence: Synthetic probe
tatttataaacaatatacttaataaaaatcattaccattctccaatctca

SEQ ID NO: 4008 - DNA, 50 bp, Artificial Sequence
  Description of Artificial Sequence: Synthetic probe
caacatattaaatataccacccataattataaacataatcctccaaacca

SEQ ID NO: 4009 - DNA, 50 bp, Artificial Sequence
  Description of Artificial Sequence: Synthetic probe
tccaaacctaaaatccccttactaattaaatactatcctaattaaaaaca

SEQ ID NO: 4010 - DNA, 50 bp, Artificial Sequence
  Description of Artificial Sequence: Synthetic probe
ctatctcatcaacaaaaaaaacaaccattaaattcctacattcatttcca

SEQ ID NO: 4011 - DNA, 50 bp, Artificial Sequence
  Description of Artificial Sequence: Synthetic probe
aaatccccttactaattaaatactatcctaattaaaaacaaaaataaaca

SEQ ID NO: 4012 - DNA, 50 bp, Artificial Sequence
  Description of Artificial Sequence: Synthetic probe
aattctaatactatctcatcaacaaaaaaaacaaccattaaattcctaca

SEQ ID NO: 4013 - DNA, 50 bp, Artificial Sequence
  Description of Artificial Sequence: Synthetic probe
taataaaaataaaaatcctcttcatcaaacaccttatcaattttttacca

SEQ ID NO: 4014 - DNA, 50 bp, Artificial Sequence
  Description of Artificial Sequence: Synthetic probe
tttttatttccactaaataatactattaacttaacactaccatatactca

SEQ ID NO: 4015 - DNA, 50 bp, Artificial Sequence
  Description of Artificial Sequence: Synthetic probe
aatcaacaaataccacaaacaataactattactctctatcctctctaaca

SEQ ID NO: 4016 - DNA, 50 bp, Artificial Sequence
  Description of Artificial Sequence: Synthetic probe
ttctaaccaaaacacaccctaatattattcaaaaacttctaaactaaaca

SEQ ID NO: 4017 - DNA, 50 bp, Artificial Sequence
  Description of Artificial Sequence: Synthetic probe
attaactaaaaatccattaccaacacctaaacaaactatcaaaaactaca

SEQ ID NO: 4018 - DNA, 50 bp, Artificial Sequence
  Description of Artificial Sequence: Synthetic probe
tttttggttagggtatattttggtgttatttaaaggtttttggattgaat

SEQ ID NO: 4019 - DNA, 50 bp, Artificial Sequence
  Description of Artificial Sequence: Synthetic probe
aacacaacrcttcctaaaaaaatacatctacaaccraaaaaaattcrcrc

SEQ ID NO: 4020 - DNA, 50 bp, Artificial Sequence
  Description of Artificial Sequence: Synthetic probe
aacrcttcctaaaaaaatacatctacaaccraaaaaaattcrcrcrcttc

SEQ ID NO: 4021 - DNA, 50 bp, Artificial Sequence
  Description of Artificial Sequence: Synthetic probe
acacttcctaaaaaaatacatctacaaccaaaaaaaattcacacacttca

SEQ ID NO: 4022 - DNA, 50 bp, Artificial Sequence
  Description of Artificial Sequence: Synthetic probe
taaattagaatggaagatagaaatattggagtggtgagtatagagtaaat

SEQ ID NO: 4023 - DNA, 50 bp, Artificial Sequence
  Description of Artificial Sequence: Synthetic probe
aaaacaactccactatctaaaatatataccctaattctttaccataacca

SEQ ID NO: 4024 - DNA, 50 bp, Artificial Sequence
  Description of Artificial Sequence: Synthetic probe
aaaatatataccctaattctttaccataaccaaaaaaaattcacaacaca

SEQ ID NO: 4025 - DNA, 50 bp, Artificial Sequence
  Description of Artificial Sequence: Synthetic probe
tcttttctattaaactttccactcctaaacccactccttatatatatcca

SEQ ID NO: 4026 - DNA, 50 bp, Artificial Sequence
  Description of Artificial Sequence: Synthetic probe
cctacaaaaaaactaaccttcccaccctaatattttattatacaaataca

SEQ ID NO: 4027 - DNA, 50 bp, Artificial Sequence
  Description of Artificial Sequence: Synthetic probe
caaattaaaacacatatacaaatatcataaccaccaccaaataaaaacca

SEQ ID NO: 4028 - DNA, 50 bp, Artificial Sequence
  Description of Artificial Sequence: Synthetic probe
atacctatacacatactttaacctaaaaactaccttaacacctataaaca

SEQ ID NO: 4029 - DNA, 50 bp, Artificial Sequence
  Description of Artificial Sequence: Synthetic probe
aaaaatcaaataattcaatataactattctcaccctctttcccttctaca

SEQ ID NO: 4030 - DNA, 50 bp, Artificial Sequence
  Description of Artificial Sequence: Synthetic probe
acaaaatcataaacccrcccaactcrtaattatatctacacatcctatcc

SEQ ID NO: 4031 - DNA, 50 bp, Artificial Sequence
  Description of Artificial Sequence: Synthetic probe
caaaatcataaacccacccaactcataattatatctacacatcctatcca

SEQ ID NO: 4032 - DNA, 50 bp, Artificial Sequence
  Description of Artificial Sequence: Synthetic probe
actttttaatctccttcacaaaatttctctcttaaccaaattaatacaca

SEQ ID NO: 4033 - DNA, 50 bp, Artificial Sequence
  Description of Artificial Sequence: Synthetic probe
caaaacttttaccctttttaactacctaaaaataatctcttaataactca

SEQ ID NO: 4034 - DNA, 50 bp, Artificial Sequence
  Description of Artificial Sequence: Synthetic probe
tttttaaaaatcttcaaaaatcttaaaataacaaaactaaaaaccaaaca

SEQ ID NO: 4035 - DNA, 50 bp, Artificial Sequence
  Description of Artificial Sequence: Synthetic probe
tttaaaaatcttcaaaaatcttaaaataacaaaactaaaaaccaaacaca

SEQ ID NO: 4036 - DNA, 50 bp, Artificial Sequence
  Description of Artificial Sequence: Synthetic probe
ttcaaaaatcttaaaataacaaaactaaaaaccaaacacaataactcaca

SEQ ID NO: 4037 - DNA, 50 bp, Artificial Sequence
  Description of Artificial Sequence: Synthetic probe
taaacatccacactaaaataaccaaaacttctatcctcctctttcctcca

SEQ ID NO: 4038 - DNA, 50 bp, Artificial Sequence
  Description of Artificial Sequence: Synthetic probe
tctctatttttaccccctctttttctaccacttacaaatcaatttccaca

SEQ ID NO: 4039 - DNA, 50 bp, Artificial Sequence
  Description of Artificial Sequence: Synthetic probe
tacaaataacctataaattttttaacctcacctacaaacactcaaaatca

SEQ ID NO: 4040 - DNA, 50 bp, Artificial Sequence
  Description of Artificial Sequence: Synthetic probe
gtttgtaggtgaggttaaaaaatttataggttatttgtagaataagttat

SEQ ID NO: 4041 - DNA, 50 bp, Artificial Sequence
  Description of Artificial Sequence: Synthetic probe
tttataaacaaaaccaaaaaatccataaattacttacaaaataaatcaca

SEQ ID NO: 4042 - DNA, 50 bp, Artificial Sequence
  Description of Artificial Sequence: Synthetic probe
acaataataaaatcttaactcatacaacctctacctccaaaattcaaaca

SEQ ID NO: 4043 - DNA, 50 bp, Artificial Sequence
  Description of Artificial Sequence: Synthetic probe
ttattatggaattgatttttagatgttgaaaataggaatgatggttaggt

SEQ ID NO: 4044 - DNA, 50 bp, Artificial Sequence
  Description of Artificial Sequence: Synthetic probe
acatatctaaaaaataataatctcaaatactattccacttttccacttca

SEQ ID NO: 4045 - DNA, 50 bp, Artificial Sequence
  Description of Artificial Sequence: Synthetic probe
cttaaatactatctaaataaaaatctatcacataataaacaaacaaatca

SEQ ID NO: 4046 - DNA, 50 bp, Artificial Sequence
  Description of Artificial Sequence: Synthetic probe
ttaataaacacaaccccaactatttcctcctatccattcaaaaaacatca

SEQ ID NO: 4047 - DNA, 50 bp, Artificial Sequence
  Description of Artificial Sequence: Synthetic probe
tcctacaaaacatccattaaataataaacaataaaaatataataaaaaca

SEQ ID NO: 4048 - DNA, 50 bp, Artificial Sequence
  Description of Artificial Sequence: Synthetic probe
aataaaacaacctaataaaactcaaccaaccaaaatacatcaaaaaaaac

SEQ ID NO: 4049 - DNA, 50 bp, Artificial Sequence
  Description of Artificial Sequence: Synthetic probe
raaaattaaaacatcataatcrccttcttcttaataaaaaaatacattac

SEQ ID NO: 4050 - DNA, 50 bp, Artificial Sequence
  Description of Artificial Sequence: Synthetic probe
aaatatcatccattcacaaaaataactacaaataaaaaatcccaacttac

SEQ ID NO: 4051 - DNA, 50 bp, Artificial Sequence
  Description of Artificial Sequence: Synthetic probe
acataaaccaccatacccaactaactcttttaaatttcattcaactatac

SEQ ID NO: 4052 - DNA, 50 bp, Artificial Sequence
  Description of Artificial Sequence: Synthetic probe
caattaaaaaccctaataaacatcttatccccrcccraactaaaactccc

SEQ ID NO: 4053 - DNA, 50 bp, Artificial Sequence
  Description of Artificial Sequence: Synthetic probe
gttgttttgttttagggataggttattttttggtagtygtagtttaagtt

SEQ ID NO: 4054 - DNA, 50 bp, Artificial Sequence
  Description of Artificial Sequence: Synthetic probe
craaaccataaactcraaaattacrtttaaacaatcaaaaaccrcraccc

SEQ ID NO: 4055 - DNA, 50 bp, Artificial Sequence
  Description of Artificial Sequence: Synthetic probe
tcraccraaaccataaactcraaaattacrtttaaacaatcaaaaaccrc

SEQ ID NO: 4056 - DNA, 50 bp, Artificial Sequence
  Description of Artificial Sequence: Synthetic probe
tctcraccraaaccataaactcraaaattacrtttaaacaatcaaaaacc

SEQ ID NO: 4057 - DNA, 50 bp, Artificial Sequence
  Description of Artificial Sequence: Synthetic probe
crcaattctcraatctataactccraccraaaattaaatctaaacrtccc

SEQ ID NO: 4058 - DNA, 50 bp, Artificial Sequence
  Description of Artificial Sequence: Synthetic probe
ttctcraatctataactccraccraaaattaaatctaaacrtcccraacc

SEQ ID NO: 4059 - DNA, 50 bp, Artificial Sequence
  Description of Artificial Sequence: Synthetic probe
aaaaaccraaactaaaattattaaccrcrcracratactaaaccraaaac

SEQ ID NO: 4060 - DNA, 50 bp, Artificial Sequence
  Description of Artificial Sequence: Synthetic probe
tactaaaccraaaacraaaaccrtaattccctaaataacrcaaaactccc

SEQ ID NO: 4061 - DNA, 50 bp, Artificial Sequence
  Description of Artificial Sequence: Synthetic probe
aaccraaaacraaaaccrtaattccctaaataacrcaaaactcccraaac

SEQ ID NO: 4062 - DNA, 50 bp, Artificial Sequence
  Description of Artificial Sequence: Synthetic probe
tacctatcacctacraaatccratacaactcatacaaactcaattcccac

SEQ ID NO: 4063 - DNA, 50 bp, Artificial Sequence
  Description of Artificial Sequence: Synthetic probe
tacattatcaactattccacatatatcttattcctcaacaaaataataac

SEQ ID NO: 4064 - DNA, 50 bp, Artificial Sequence
  Description of Artificial Sequence: Synthetic probe
aacacccctacacraaccctttaccattctttataatataaaacaaaacc

SEQ ID NO: 4065 - DNA, 50 bp, Artificial Sequence
  Description of Artificial Sequence: Synthetic probe
actaacctacaataatcctcctacttaaaaatcacaaaacacccctacac

SEQ ID NO: 4066 - DNA, 50 bp, Artificial Sequence
  Description of Artificial Sequence: Synthetic probe
acctctcaaacttctcaatctccaaaacaaaacaaaccatatatctaaac

SEQ ID NO: 4067 - DNA, 50 bp, Artificial Sequence
  Description of Artificial Sequence: Synthetic probe
aaaaccttccctcaaaaccctaaaactctaaactccaaaactcaacttcc

SEQ ID NO: 4068 - DNA, 50 bp, Artificial Sequence
  Description of Artificial Sequence: Synthetic probe
ctctcaaacttctcaatctccaaaacaaaacaaaccatatatctaaacrc

SEQ ID NO: 4069 - DNA, 50 bp, Artificial Sequence
  Description of Artificial Sequence: Synthetic probe
cacacccaactaaaaaaataattaacratttcaacracacctccctcctc

SEQ ID NO: 4070 - DNA, 50 bp, Artificial Sequence
  Description of Artificial Sequence: Synthetic probe
aaaaaaactaaaccccacacccaactaaaaaaataattaacratttcaac

SEQ ID NO: 4071 - DNA, 50 bp, Artificial Sequence
  Description of Artificial Sequence: Synthetic probe
tattataaatatttacrcactattataaacatttacattaatcccttctc

SEQ ID NO: 4072 - DNA, 50 bp, Artificial Sequence
  Description of Artificial Sequence: Synthetic probe
tttttagagattaggagggggaaagaggatattgttatagttttgttttt

SEQ ID NO: 4073 - DNA, 50 bp, Artificial Sequence
  Description of Artificial Sequence: Synthetic probe
tgatgayggatataggggttttatagatttagaagtatttggagttattt

SEQ ID NO: 4074 - DNA, 50 bp, Artificial Sequence
  Description of Artificial Sequence: Synthetic probe
actaaaatcatcactcctcaaacttctccctcacttattttactaataac

SEQ ID NO: 4075 - DNA, 50 bp, Artificial Sequence
  Description of Artificial Sequence: Synthetic probe
gtttttygaaatgattttagatgtttttgagtttgtgaggtttttgtgtt

SEQ ID NO: 4076 - DNA, 50 bp, Artificial Sequence
  Description of Artificial Sequence: Synthetic probe
ttccraaacaaaaataaactacaaaaactacrcraaaatttaaacraaac

SEQ ID NO: 4077 - DNA, 50 bp, Artificial Sequence
  Description of Artificial Sequence: Synthetic probe
atttaaattgattttyggagggtagtatgattaagggaaggagttgtttt

SEQ ID NO: 4078 - DNA, 50 bp, Artificial Sequence
  Description of Artificial Sequence: Synthetic probe
aaaaccctctaacccaacratctctctaaacaaaataatccaaaacaaac

SEQ ID NO: 4079 - DNA, 50 bp, Artificial Sequence
  Description of Artificial Sequence: Synthetic probe
acttaatatccccraaaactacrtactccaatatcacttaaatacccacc

SEQ ID NO: 4080 - DNA, 50 bp, Artificial Sequence
  Description of Artificial Sequence: Synthetic probe
taaaatataaaccrtaaaacraaaaaacaactctaaaaactcrtaattcc

SEQ ID NO: 4081 - DNA, 50 bp, Artificial Sequence
  Description of Artificial Sequence: Synthetic probe
crcaaaaaaaactatcraaacaaacractttaaccaactaatactcrcac

SEQ ID NO: 4082 - DNA, 50 bp, Artificial Sequence
  Description of Artificial Sequence: Synthetic probe
aaaaaaaaactataaaaaaccrtaatacctacctacacaaccctcctcrc

SEQ ID NO: 4083 - DNA, 50 bp, Artificial Sequence
  Description of Artificial Sequence: Synthetic probe
tacctacctacacaaccctcctcrcrtacraacattaattaactaaaatc

SEQ ID NO: 4084 - DNA, 50 bp, Artificial Sequence
  Description of Artificial Sequence: Synthetic probe
cracaaacrtaaaaaaacrcataacrcaacraatcaaacraaataaaccc

SEQ ID NO: 4085 - DNA, 50 bp, Artificial Sequence
  Description of Artificial Sequence: Synthetic probe
rttaccracraactaaacctacatccraaaaacctaaacraaaaaaaacc

SEQ ID NO: 4086 - DNA, 50 bp, Artificial Sequence
  Description of Artificial Sequence: Synthetic probe
atcaaacaaacraataatacraatttcrcctaatctaaccctaccccaac

SEQ ID NO: 4087 - DNA, 50 bp, Artificial Sequence
  Description of Artificial Sequence: Synthetic probe
craacaaaaaactatcacaaccacaaccaaaaaaactataaaactactac

SEQ ID NO: 4088 - DNA, 50 bp, Artificial Sequence
  Description of Artificial Sequence: Synthetic probe
ccaaaaactcccttaaaacaaacccaaactaactctaaaatccctcctcc

SEQ ID NO: 4089 - DNA, 50 bp, Artificial Sequence
  Description of Artificial Sequence: Synthetic probe
acataacctctaaaaccaaactacctaaattctatctctaccacttacac

SEQ ID NO: 4090 - DNA, 50 bp, Artificial Sequence
  Description of Artificial Sequence: Synthetic probe
caattaccraaaataaaactacraaaaataaccrccrctacraccataac

SEQ ID NO: 4091 - DNA, 50 bp, Artificial Sequence
  Description of Artificial Sequence: Synthetic probe
ttttttatatttgaggttttagttygtaatattagttttygggtygtagt

SEQ ID NO: 4092 - DNA, 50 bp, Artificial Sequence
  Description of Artificial Sequence: Synthetic probe
ttctcctaaatcrcaccrcctcttcctcctaaaaactatataataatatc

SEQ ID NO: 4093 - DNA, 50 bp, Artificial Sequence
  Description of Artificial Sequence: Synthetic probe
ctcctaaatcrcaccrcctcttcctcctaaaaactatataataatatcrc

SEQ ID NO: 4094 - DNA, 50 bp, Artificial Sequence
  Description of Artificial Sequence: Synthetic probe
cacctttccaaatataaaccrttcracaaaaaattaactttaaaccratc

SEQ ID NO: 4095 - DNA, 50 bp, Artificial Sequence
  Description of Artificial Sequence: Synthetic probe
caaattcaacactaattccraaacccctcacttcattcaaaatataaacc

SEQ ID NO: 4096 - DNA, 50 bp, Artificial Sequence
  Description of Artificial Sequence: Synthetic probe
aaaacttaataaatcaacrattcctaattaaccaaacrtaccttaaaaac

SEQ ID NO: 4097 - DNA, 50 bp, Artificial Sequence
  Description of Artificial Sequence: Synthetic probe
acrataatctaaacaaaaacraaatcaattaaaaacrcaattctaacccc

SEQ ID NO: 4098 - DNA, 50 bp, Artificial Sequence
  Description of Artificial Sequence: Synthetic probe
taataaaacaaaacraaacracatctcaactctcrccttttcaaaattcc

SEQ ID NO: 4099 - DNA, 50 bp, Artificial Sequence
  Description of Artificial Sequence: Synthetic probe
taaaatacratttcccaaaccaattaaaaaacractctcraatataaaac

SEQ ID NO: 4100 - DNA, 50 bp, Artificial Sequence
  Description of Artificial Sequence: Synthetic probe
acrctaaaaaacracrtaataaaacaaaacraaacracatctcaactctc

SEQ ID NO: 4101 - DNA, 50 bp, Artificial Sequence
  Description of Artificial Sequence: Synthetic probe
ccrcraaacraaaactactacttcctaaaactaaaaataaatccractcc

SEQ ID NO: 4102 - DNA, 50 bp, Artificial Sequence
  Description of Artificial Sequence: Synthetic probe
aaaaatatcctaaataaatctataactaccraacacacccrccrcraaac

SEQ ID NO: 4103 - DNA, 50 bp, Artificial Sequence
  Description of Artificial Sequence: Synthetic probe
caacraaaaatatcctaaataaatctataactaccraacacacccrccrc

SEQ ID NO: 4104 - DNA, 50 bp, Artificial Sequence
  Description of Artificial Sequence: Synthetic probe
rtcracaacraaaaatatcctaaataaatctataactaccraacacaccc

SEQ ID NO: 4105 - DNA, 50 bp, Artificial Sequence
  Description of Artificial Sequence: Synthetic probe
aaaacratttcrcrctaaaaaaaaccctttaaaacttataactccactcc

SEQ ID NO: 4106 - DNA, 50 bp, Artificial Sequence
  Description of Artificial Sequence: Synthetic probe
tacaaataaaaatataaaaatctaaaacacaaactaaccccraaaccttc

SEQ ID NO: 4107 - DNA, 50 bp, Artificial Sequence
  Description of Artificial Sequence: Synthetic probe
acctaactaaatttataaaaatataacttaaataccacaacttccratac

SEQ ID NO: 4108 - DNA, 50 bp, Artificial Sequence
  Description of Artificial Sequence: Synthetic probe
cctcaaatatctaatattccttaactaaacactcatatttaaaacaaaac

SEQ ID NO: 4109 - DNA, 50 bp, Artificial Sequence
  Description of Artificial Sequence: Synthetic probe
aaacaaaaacccaaaattaaaaataaaaacracacaacattatactcttc

SEQ ID NO: 4110 - DNA, 50 bp, Artificial Sequence
  Description of Artificial Sequence: Synthetic probe
tcttaaaaaaaacrctttcaacatttccccattataataatatattttac

SEQ ID NO: 4111 - DNA, 50 bp, Artificial Sequence
  Description of Artificial Sequence: Synthetic probe
aaattacaaacataaaccactatacccactctccttaaatattttcaacc

SEQ ID NO: 4112 - DNA, 50 bp, Artificial Sequence
  Description of Artificial Sequence: Synthetic probe
agatattagaagtagttttgttaagtagttaagtagaggtggtatttttg

SEQ ID NO: 4113 - DNA, 50 bp, Artificial Sequence
  Description of Artificial Sequence: Synthetic probe
aacatctctacracaaaaaactataacccaaacaaccttactaactaaac

SEQ ID NO: 4114 - DNA, 50 bp, Artificial Sequence
  Description of Artificial Sequence: Synthetic probe
acracaaaaaactataacccaaacaaccttactaactaaacraaaaaaac

SEQ ID NO: 4115 - DNA, 50 bp, Artificial Sequence
  Description of Artificial Sequence: Synthetic probe
ctacaactaattatacaatcrccracrctccatttctaacccataaaaac

SEQ ID NO: 4116 - DNA, 50 bp, Artificial Sequence
  Description of Artificial Sequence: Synthetic probe
tacacraatattacccttaaattcctacaactaattatacaatcrccrac

SEQ ID NO: 4117 - DNA, 50 bp, Artificial Sequence
  Description of Artificial Sequence: Synthetic probe
aaatacacraatattacccttaaattcctacaactaattatacaatcrcc

SEQ ID NO: 4118 - DNA, 50 bp, Artificial Sequence
  Description of Artificial Sequence: Synthetic probe
aaaacrccracractacacaaccaactacaaaaactcaaaaacaacatcc

SEQ ID NO: 4119 - DNA, 50 bp, Artificial Sequence
  Description of Artificial Sequence: Synthetic probe
caaccaactacaaaaactcaaaaacaacatccrtatattctaccraatcc

SEQ ID NO: 4120 - DNA, 50 bp, Artificial Sequence
  Description of Artificial Sequence: Synthetic probe
ataattagttgtaggaatttaagggtaatattygtgtattttgtygggtt

SEQ ID NO: 4121 - DNA, 50 bp, Artificial Sequence
  Description of Artificial Sequence: Synthetic probe
cctaaataaaacaccaactcccccaactcrccataatttttcctttaacc

SEQ ID NO: 4122 - DNA, 50 bp, Artificial Sequence
  Description of Artificial Sequence: Synthetic probe
aacaatctcttcaaacacttcatcctatccacttcctaataaaaataccc

SEQ ID NO: 4123 - DNA, 50 bp, Artificial Sequence
  Description of Artificial Sequence: Synthetic probe
aataaaaaataaacctaaaaaaaacccccaattaaaaaaactaatccctc

SEQ ID NO: 4124 - DNA, 50 bp, Artificial Sequence
  Description of Artificial Sequence: Synthetic probe
agttttgattatttagtttttgagttatagagaagaggtgtygtagggtt

SEQ ID NO: 4125 - DNA, 50 bp, Artificial Sequence
  Description of Artificial Sequence: Synthetic probe
craattccaataaccaacaaatcccraacaatctcattataaatctctac

SEQ ID NO: 4126 - DNA, 50 bp, Artificial Sequence
  Description of Artificial Sequence: Synthetic probe
crtaaaaatctacaataaaactatccraaacctactaaccactaaaaccc

SEQ ID NO: 4127 - DNA, 50 bp, Artificial Sequence
  Description of Artificial Sequence: Synthetic probe
atatcraacattaataacaataaactcctcactccctaaccctacacrac

SEQ ID NO: 4128 - DNA, 50 bp, Artificial Sequence
  Description of Artificial Sequence: Synthetic probe
aacatatcraacattaataacaataaactcctcactccctaaccctacac

SEQ ID NO: 4129 - DNA, 50 bp, Artificial Sequence
  Description of Artificial Sequence: Synthetic probe
ccaatacccataaatcctcacttctttctcacaaaaaacaaaaacatatc

SEQ ID NO: 4130 - DNA, 50 bp, Artificial Sequence
  Description of Artificial Sequence: Synthetic probe
acaaattatcaaactaaattaccacatccrattttaacctataaactatc

SEQ ID NO: 4131 - DNA, 50 bp, Artificial Sequence
  Description of Artificial Sequence: Synthetic probe
ttaacaaatacatcactccctcrccactcccaaattaaaacaaatctacc

SEQ ID NO: 4132 - DNA, 50 bp, Artificial Sequence
  Description of Artificial Sequence: Synthetic probe
aacataaaatataataaccctcctcrttttaacaaatacatcactccctc

SEQ ID NO: 4133 - DNA, 50 bp, Artificial Sequence
  Description of Artificial Sequence: Synthetic probe
crattttaacctataaactatcrataaatctaccttaacctaaaaataac

SEQ ID NO: 4134 - DNA, 50 bp, Artificial Sequence
  Description of Artificial Sequence: Synthetic probe
tctttcctaaaaatcttaactatcctatcaaaacttatattccccacccc

SEQ ID NO: 4135 - DNA, 50 bp, Artificial Sequence
  Description of Artificial Sequence: Synthetic probe
actttcatatctataaaaataaaaactataatctataccctctaccaaac

SEQ ID NO: 4136 - DNA, 50 bp, Artificial Sequence
  Description of Artificial Sequence: Synthetic probe
tatccacrccccctccttaatcactaattataaataactttcacccttcc

SEQ ID NO: 4137 - DNA, 50 bp, Artificial Sequence
  Description of Artificial Sequence: Synthetic probe
tctcctaatcrtaattaactaaacccraaaataactcctaaaaccctcac

SEQ ID NO: 4138 - DNA, 50 bp, Artificial Sequence
  Description of Artificial Sequence: Synthetic probe
acttattttccrtcracrtaattaaaactccaacrctacctctcctaatc

SEQ ID NO: 4139 - DNA, 50 bp, Artificial Sequence
  Description of Artificial Sequence: Synthetic probe
aaactaacrcctcctaataactacaataaaaaacrcacttattttccrtc

SEQ ID NO: 4140 - DNA, 50 bp, Artificial Sequence
  Description of Artificial Sequence: Synthetic probe
acraaaaacaaatacrctccctactacaatcaccaaaaaacrctaatccc

SEQ ID NO: 4141 - DNA, 50 bp, Artificial Sequence
  Description of Artificial Sequence: Synthetic probe
acrcaaaaaaacrataaataaaacrcractcrtcacraaaaaaacraaac

SEQ ID NO: 4142 - DNA, 50 bp, Artificial Sequence
  Description of Artificial Sequence: Synthetic probe
rcaaaaaaacrataaataaaacrcractcrtcacraaaaaaacraaacrc

SEQ ID NO: 4143 - DNA, 50 bp, Artificial Sequence
  Description of Artificial Sequence: Synthetic probe
tcaccaactttttaaatcctcttccaactctaataactaactctcctctc

SEQ ID NO: 4144 - DNA, 50 bp, Artificial Sequence
  Description of Artificial Sequence: Synthetic probe
cttctcctccccatttcttttctaactaaacccccccaaaatacaataac

SEQ ID NO: 4145 - DNA, 50 bp, Artificial Sequence
  Description of Artificial Sequence: Synthetic probe
aacaaaaaaaactaaatcccaaaataaaaaaacaccaaaacractcaacc

SEQ ID NO: 4146 - DNA, 50 bp, Artificial Sequence
  Description of Artificial Sequence: Synthetic probe
tctctaaaatcttaccaaaactaatatctttccataaaaccaaaaactac

SEQ ID NO: 4147 - DNA, 50 bp, Artificial Sequence
  Description of Artificial Sequence: Synthetic probe
ttctctcacaactaccctccctaaaaaaaaactcctctattatatctatc

SEQ ID NO: 4148 - DNA, 50 bp, Artificial Sequence
  Description of Artificial Sequence: Synthetic probe
aaaactcctctattatatctatcrctctaaaactataatccctaaaaacc

SEQ ID NO: 4149 - DNA, 50 bp, Artificial Sequence
  Description of Artificial Sequence: Synthetic probe
caaaaattataccacccctttccataactacttctccctaaactaaaaac

SEQ ID NO: 4150 - DNA, 50 bp, Artificial Sequence
  Description of Artificial Sequence: Synthetic probe
ccaaaccactactctaaccaaactacttaaccttatcttaatcctcatcc

SEQ ID NO: 4151 - DNA, 50 bp, Artificial Sequence
  Description of Artificial Sequence: Synthetic probe
ttacaaacaaaaaataatttaaatacatccttttctaaccatataacctc

SEQ ID NO: 4152 - DNA, 50 bp, Artificial Sequence
  Description of Artificial Sequence: Synthetic probe
ataacaaaaaaatacctttaccttaataacratcrcaaaaacacactaac

SEQ ID NO: 4153 - DNA, 50 bp, Artificial Sequence
  Description of Artificial Sequence: Synthetic probe
aactcccacaaaaaaaataacaaaaaaatacctttaccttaataacratc

SEQ ID NO: 4154 - DNA, 50 bp, Artificial Sequence
  Description of Artificial Sequence: Synthetic probe
caaccccttcaatccatataacaaaaaaaacttcatacccaacataaccc

SEQ ID NO: 4155 - DNA, 50 bp, Artificial Sequence
  Description of Artificial Sequence: Synthetic probe
tctcattactcactccccaaaaccaccacaataacaataactctactatc

SEQ ID NO: 4156 - DNA, 50 bp, Artificial Sequence
  Description of Artificial Sequence: Synthetic probe
accatataaactaaaaaaactaaactaaaatactaaacatctaaacaacc

SEQ ID NO: 4157 - DNA, 50 bp, Artificial Sequence
  Description of Artificial Sequence: Synthetic probe
caaaaatcctatattccccctcaaataaaacctaaaaatactacaatacc

SEQ ID NO: 4158 - DNA, 50 bp, Artificial Sequence
  Description of Artificial Sequence: Synthetic probe
gtttgtttagatattgggtgtaggttttatggaattattgtaggtagttt

SEQ ID NO: 4159 - DNA, 50 bp, Artificial Sequence
  Description of Artificial Sequence: Synthetic probe
aaataaaaccaaaacaaactctctaaaaaccaaaaataccctctttcttc

SEQ ID NO: 4160 - DNA, 50 bp, Artificial Sequence
  Description of Artificial Sequence: Synthetic probe
acttacacaaaaaaactataccatcccctaaaaaactcacaaacaaaaac

SEQ ID NO: 4161 - DNA, 50 bp, Artificial Sequence
  Description of Artificial Sequence: Synthetic probe
ccctcttacccatatccaaattctataaatttaaatactatatatatcrc

SEQ ID NO: 4162 - DNA, 50 bp, Artificial Sequence
  Description of Artificial Sequence: Synthetic probe
ttttttttgtttatgtttaggttttatgaatttgaatgttgtgtgtgtyg

SEQ ID NO: 4163 - DNA, 50 bp, Artificial Sequence
  Description of Artificial Sequence: Synthetic probe
ccccatttttcttcatttctcccaactttcaaacacccccaaaaaaaaac

SEQ ID NO: 4164 - DNA, 50 bp, Artificial Sequence
  Description of Artificial Sequence: Synthetic probe
atttagtgagtgaygttaagtggttaattataggttagtttygtaggtta

SEQ ID NO: 4165 - DNA, 50 bp, Artificial Sequence
  Description of Artificial Sequence: Synthetic probe
ctcaataaataacrccaaataaccaatcacaaaccaacctcrcaaaccac

SEQ ID NO: 4166 - DNA, 50 bp, Artificial Sequence
  Description of Artificial Sequence: Synthetic probe
aaaaaaacaaactataaatcctaattataaatacaacttctactaccccc

SEQ ID NO: 4167 - DNA, 50 bp, Artificial Sequence
  Description of Artificial Sequence: Synthetic probe
aaaatcttacttcccraaaaaaaataacrccctcctctaaaaaataaaac

SEQ ID NO: 4168 - DNA, 50 bp, Artificial Sequence
  Description of Artificial Sequence: Synthetic probe
ctctttcctccctaatttctcttattttctatacccctcttaattacccc

SEQ ID NO: 4169 - DNA, 50 bp, Artificial Sequence
  Description of Artificial Sequence: Synthetic probe
aactccttccaaccttctaataaatccaaaccctactaaccttataaacc

SEQ ID NO: 4170 - DNA, 50 bp, Artificial Sequence
  Description of Artificial Sequence: Synthetic probe
ctccttatcctaaatcctcaaaatctaaaaatctctaacraaaatctccc

SEQ ID NO: 4171 - DNA, 50 bp, Artificial Sequence
  Description of Artificial Sequence: Synthetic probe
atctaaaaatctctaacraaaatctcccrtatattttaaataaaaacacc

SEQ ID NO: 4172 - DNA, 50 bp, Artificial Sequence
  Description of Artificial Sequence: Synthetic probe
aataataaataacctaatttattttaaaaatccccttacccccctccccc

SEQ ID NO: 4173 - DNA, 50 bp, Artificial Sequence
  Description of Artificial Sequence: Synthetic probe
aataattaacacatttactcctaatttttctttactctaataacaatctc

SEQ ID NO: 4174 - DNA, 50 bp, Artificial Sequence
  Description of Artificial Sequence: Synthetic probe
cacaaaaaaatatccccatatctcaaaaacacaaacatcctttcattcac

SEQ ID NO: 4175 - DNA, 50 bp, Artificial Sequence
  Description of Artificial Sequence: Synthetic probe
aaaaatccactctaattcaatataacctcttttttttaaaataaaatatc

SEQ ID NO: 4176 - DNA, 50 bp, Artificial Sequence
  Description of Artificial Sequence: Synthetic probe
caaaaaacratactactataaactctacctaaataacatactatatacac

SEQ ID NO: 4177 - DNA, 50 bp, Artificial Sequence
  Description of Artificial Sequence: Synthetic probe
ttaagaagyggtattattgtgagttttgtttggatgatatgttgtatgta

SEQ ID NO: 4178 - DNA, 50 bp, Artificial Sequence
  Description of Artificial Sequence: Synthetic probe
taaactctacctaaataacatactatatacacrcaccacctccaaacccc

SEQ ID NO: 4179 - DNA, 50 bp, Artificial Sequence
  Description of Artificial Sequence: Synthetic probe
tacaaccrcaaaacacraacaaccracaaattattaaactcraaatactc

SEQ ID NO: 4180 - DNA, 50 bp, Artificial Sequence
  Description of Artificial Sequence: Synthetic probe
rctttttatctaaatcacratacaaatacaaccrcaaaacacraacaacc

SEQ ID NO: 4181 - DNA, 50 bp, Artificial Sequence
  Description of Artificial Sequence: Synthetic probe
tctaaaaacaccrtcttctaaaacraacacttcraatttaacaacctacc

SEQ ID NO: 4182 - DNA, 50 bp, Artificial Sequence
  Description of Artificial Sequence: Synthetic probe
cttcttacrctttttatctaaatcacratacaaatacaaccrcaaaacac

SEQ ID NO: 4183 - DNA, 50 bp, Artificial Sequence
  Description of Artificial Sequence: Synthetic probe
caccrtcttctaaaacraacacttcraatttaacaacctaccractatcc

SEQ ID NO: 4184 - DNA, 50 bp, Artificial Sequence
  Description of Artificial Sequence: Synthetic probe
taccttatccttcttacrctttttatctaaatcacratacaaatacaacc

SEQ ID NO: 4185 - DNA, 50 bp, Artificial Sequence
  Description of Artificial Sequence: Synthetic probe
ractatccrtaccctacractacatctataccrtaactcaaacaaaaaac

SEQ ID NO: 4186 - DNA, 50 bp, Artificial Sequence
  Description of Artificial Sequence: Synthetic probe
aaccactaacacaatcaccaaaccracataacctaccttatccttcttac

SEQ ID NO: 4187 - DNA, 50 bp, Artificial Sequence
  Description of Artificial Sequence: Synthetic probe
tctataaaataacrcccaaccaaaataaccactaacacaatcaccaaacc

SEQ ID NO: 4188 - DNA, 50 bp, Artificial Sequence
  Description of Artificial Sequence: Synthetic probe
ttgtatygtgatttagataaaaagygtaagaaggataaggtaggttatgt

SEQ ID NO: 4189 - DNA, 50 bp, Artificial Sequence
  Description of Artificial Sequence: Synthetic probe
ccataaacaaaatactcattatctaataacrtactttcaaccrcacaacc

SEQ ID NO: 4190 - DNA, 50 bp, Artificial Sequence
  Description of Artificial Sequence: Synthetic probe
tttatgggtaagatgtttattgtttggtaaygtgtttttagtygtatagt

SEQ ID NO: 4191 - DNA, 50 bp, Artificial Sequence
  Description of Artificial Sequence: Synthetic probe
tatatagttttatgggtaagatgtttattgtttggtaaygtgtttttagt

SEQ ID NO: 4192 - DNA, 50 bp, Artificial Sequence
  Description of Artificial Sequence: Synthetic probe
atataactccataaacaaaatactcattatctaataacrtactttcaacc

SEQ ID NO: 4193 - DNA, 50 bp, Artificial Sequence
  Description of Artificial Sequence: Synthetic probe
tacaaactctttatataactccataaacaaaatactcattatctaataac

SEQ ID NO: 4194 - DNA, 50 bp, Artificial Sequence
  Description of Artificial Sequence: Synthetic probe
acccataaaactatataaaaaatttacaaaatatatcaccaaccattatc

SEQ ID NO: 4195 - DNA, 50 bp, Artificial Sequence
  Description of Artificial Sequence: Synthetic probe
tttttttgtttttgatatttagggygggttttaagattgtatatagtatt

SEQ ID NO: 4196 - DNA, 50 bp, Artificial Sequence
  Description of Artificial Sequence: Synthetic probe
ttcctaacttctatcactattctaattcaaaatctaactttcatacctcc

SEQ ID NO: 4197 - DNA, 50 bp, Artificial Sequence
  Description of Artificial Sequence: Synthetic probe
acatactccctcctttccaataaactaacaattcctactaatcctttccc

SEQ ID NO: 4198 - DNA, 50 bp, Artificial Sequence
  Description of Artificial Sequence: Synthetic probe
cctccaactaactcctcctcctaactttcctaattatcaataaaaccacc

SEQ ID NO: 4199 - DNA, 50 bp, Artificial Sequence
  Description of Artificial Sequence: Synthetic probe
tatcccactaacaccttaaactcractaatataaaacaaaactcaccatc

SEQ ID NO: 4200 - DNA, 50 bp, Artificial Sequence
  Description of Artificial Sequence: Synthetic probe
caaaaaaaataaaacrctaataaacctatctacratatcctcccracctc

SEQ ID NO: 4201 - DNA, 50 bp, Artificial Sequence
  Description of Artificial Sequence: Synthetic probe
actaaaaaaaatatttacttcrtaacractacrctacrcaaaacraaacc

SEQ ID NO: 4202 - DNA, 50 bp, Artificial Sequence
  Description of Artificial Sequence: Synthetic probe
ccrtataaacccraaactaccacttactaactaaaaaaaaccrctacrac

SEQ ID NO: 4203 - DNA, 50 bp, Artificial Sequence
  Description of Artificial Sequence: Synthetic probe
ygtgaggtttgtttatttgggtatttttgtataagtttaaagagattggg

SEQ ID NO: 4204 - DNA, 50 bp, Artificial Sequence
  Description of Artificial Sequence: Synthetic probe
rtaaaatctactcatctaaatactcctacataaacccaaaaaaactaaac

SEQ ID NO: 4205 - DNA, 50 bp, Artificial Sequence
  Description of Artificial Sequence: Synthetic probe
rcccaatctctttaaacttatacaaaaatacccaaataaacaaacctcac

SEQ ID NO: 4206 - DNA, 50 bp, Artificial Sequence
  Description of Artificial Sequence: Synthetic probe
aaataaaattccatacaacaatttttatataaaatctccaatctaaacac

SEQ ID NO: 4207 - DNA, 50 bp, Artificial Sequence
  Description of Artificial Sequence: Synthetic probe
actctcracccaaatcratataaccctcaaaactactactattaattaac

SEQ ID NO: 4208 - DNA, 50 bp, Artificial Sequence
  Description of Artificial Sequence: Synthetic probe
aacacctcccaaaataaaacatacaatataaaaaactctcracccaaatc

SEQ ID NO: 4209 - DNA, 50 bp, Artificial Sequence
  Description of Artificial Sequence: Synthetic probe
tggataygttaattaatagtagtagttttgagggttatatygatttgggt

SEQ ID NO: 4210 - DNA, 50 bp, Artificial Sequence
  Description of Artificial Sequence: Synthetic probe
aaacacrctaaccaacaacaataactttaaaaattacatcracttaaacc

SEQ ID NO: 4211 - DNA, 50 bp, Artificial Sequence
  Description of Artificial Sequence: Synthetic probe
aactctaaaaaaccccaacatccaaaaacaaccaaaccrccaaaataaac

SEQ ID NO: 4212 - DNA, 50 bp, Artificial Sequence
  Description of Artificial Sequence: Synthetic probe
tagttttgaggaattttaatatttaaaggtagttaagtygttagagtgag

SEQ ID NO: 4213 - DNA, 50 bp, Artificial Sequence
  Description of Artificial Sequence: Synthetic probe
aacaaatttaataaaaattaaaccctaatattaaccccaaaacaaccacc

SEQ ID NO: 4214 - DNA, 50 bp, Artificial Sequence
  Description of Artificial Sequence: Synthetic probe
aaaaataaaaactaaataataaacttaaaataaaacrcccctcataatac

SEQ ID NO: 4215 - DNA, 50 bp, Artificial Sequence
  Description of Artificial Sequence: Synthetic probe
aaaaactaaataataaacttaaaataaaacrcccctcataatacraaatc

SEQ ID NO: 4216 - DNA, 50 bp, Artificial Sequence
  Description of Artificial Sequence: Synthetic probe
aataataaacttaaaataaaacrcccctcataatacraaatcrtataccc

SEQ ID NO: 4217 - DNA, 50 bp, Artificial Sequence
  Description of Artificial Sequence: Synthetic probe
aataaacttaaaataaaacrcccctcataatacraaatcrtatacccrac

SEQ ID NO: 4218 - DNA, 50 bp, Artificial Sequence
  Description of Artificial Sequence: Synthetic probe
caacaacctccrctcatactcttccaacttccrattaaacatatacaacc

SEQ ID NO: 4219 - DNA, 50 bp, Artificial Sequence
  Description of Artificial Sequence: Synthetic probe
atacraaaaaaaaattcactcactaaaaaaacractacacatatccaacc

SEQ ID NO: 4220 - DNA, 50 bp, Artificial Sequence
  Description of Artificial Sequence: Synthetic probe
agtaygaggaggagatttatttattgaaagagyggttgtatatgtttaat

SEQ ID NO: 4221 - DNA, 50 bp, Artificial Sequence
  Description of Artificial Sequence: Synthetic probe
aacccaaaatatcacaccaaaaaaccaaatcaaaacaacaaattcccacc

SEQ ID NO: 4222 - DNA, 50 bp, Artificial Sequence
  Description of Artificial Sequence: Synthetic probe
ctctaaaatcrcraacrcrttaaaatccctaatcttttataaaaaataac

SEQ ID NO: 4223 - DNA, 50 bp, Artificial Sequence
  Description of Artificial Sequence: Synthetic probe
actccaacrcaaaaataaaaaacratacrccaaaataaactacrctaaac

SEQ ID NO: 4224 - DNA, 50 bp, Artificial Sequence
  Description of Artificial Sequence: Synthetic probe
aataaaaaaatctattcatccctctcctacttctaaaaaaaacctaactc

SEQ ID NO: 4225 - DNA, 50 bp, Artificial Sequence
  Description of Artificial Sequence: Synthetic probe
taataaaatctcraatttcaatataaccatcacccaaatacccaatatac

SEQ ID NO: 4226 - DNA, 50 bp, Artificial Sequence
  Description of Artificial Sequence: Synthetic probe
aaacaaacaaatcacaaaatcaaaaaatcaaaaccatcctaactcacaca

SEQ ID NO: 4227 - DNA, 50 bp, Artificial Sequence
  Description of Artificial Sequence: Synthetic probe
cctaccctatcaacctcctatttacaaaacctccttcttcactaatcttc

SEQ ID NO: 4228 - DNA, 50 bp, Artificial Sequence
  Description of Artificial Sequence: Synthetic probe
tttttygattgggtttttttatttgggattgttgagggtaataggttttt

SEQ ID NO: 4229 - DNA, 50 bp, Artificial Sequence
  Description of Artificial Sequence: Synthetic probe
taaaaacccaacraattaaccraaaataaaccaatcccctaaacaacaac

SEQ ID NO: 4230 - DNA, 50 bp, Artificial Sequence
  Description of Artificial Sequence: Synthetic probe
accaaaaaactaaaaaaattcccaataaaaactccraacttcactttctc

SEQ ID NO: 4231 - DNA, 50 bp, Artificial Sequence
  Description of Artificial Sequence: Synthetic probe
ttcaaaacaatcaataataacaactactataaatccactattcaacaaac

SEQ ID NO: 4232 - DNA, 50 bp, Artificial Sequence
  Description of Artificial Sequence: Synthetic probe
ataccactaaaatctttaccaattcatcctaactctaaaacaaactcttc

SEQ ID NO: 4233 - DNA, 50 bp, Artificial Sequence
  Description of Artificial Sequence: Synthetic probe
taccactaaaatctttaccaattcatcctaactctaaaacaaactcttca

SEQ ID NO: 4234 - DNA, 50 bp, Artificial Sequence
  Description of Artificial Sequence: Synthetic probe
caacaaaaacaaccacaaattaaaaacataatttctcacttcccaacttc

SEQ ID NO: 4235 - DNA, 50 bp, Artificial Sequence
  Description of Artificial Sequence: Synthetic probe
tatcctctcatttaaaaaattactccrtactatccctttctctcaaaacc

SEQ ID NO: 4236 - DNA, 50 bp, Artificial Sequence
  Description of Artificial Sequence: Synthetic probe
ccctacaaaaaaacctaaccaacctccraacaaaactacaaaaccaccac

SEQ ID NO: 4237 - DNA, 50 bp, Artificial Sequence
  Description of Artificial Sequence: Synthetic probe
actaatacatcccctaccttacccacattaaccctccacaaaaaataatc

SEQ ID NO: 4238 - DNA, 50 bp, Artificial Sequence
  Description of Artificial Sequence: Synthetic probe
attttygattaatgggttttgatagtagtttattgttttygygatggtaa

SEQ ID NO: 4239 - DNA, 50 bp, Artificial Sequence
  Description of Artificial Sequence: Synthetic probe
cacccrccrcraaacraaaactactacttcctaaaactaaaaataaatcc

SEQ ID NO: 4240 - DNA, 50 bp, Artificial Sequence
  Description of Artificial Sequence: Synthetic probe
caattaaaataactaaaccccattttcaccatcctctaccacaaaatctc

SEQ ID NO: 4241 - DNA, 50 bp, Artificial Sequence
  Description of Artificial Sequence: Synthetic probe
actcatacaaactcaattcccacrttttactaacattctaaacattcrcc

SEQ ID NO: 4242 - DNA, 50 bp, Artificial Sequence
  Description of Artificial Sequence: Synthetic probe
agtttatatagatttagtttttaygttttgttggtattttgggtattygt

SEQ ID NO: 4243 - DNA, 50 bp, Artificial Sequence
  Description of Artificial Sequence: Synthetic probe
aaactacrtactccaatatcacttaaatacccaccraattccraaatcac

SEQ ID NO: 4244 - DNA, 50 bp, Artificial Sequence
  Description of Artificial Sequence: Synthetic probe
tactaaatctctatcaattcctccccccaactataatattcaaacaaatc

SEQ ID NO: 4245 - DNA, 50 bp, Artificial Sequence
  Description of Artificial Sequence: Synthetic probe
aaaaaaaaaataatatcaacacacccaacaaataaactactccctaaacc

SEQ ID NO: 4246 - DNA, 50 bp, Artificial Sequence
  Description of Artificial Sequence: Synthetic probe
ctttaaaaaacattaaaatcctaaactcctcctctactaaataaaaccrc

SEQ ID NO: 4247 - DNA, 50 bp, Artificial Sequence
  Description of Artificial Sequence: Synthetic probe
ttaaaaattttattagtyggaagtgaygtgttagtttagtttygtaggtt

SEQ ID NO: 4248 - DNA, 50 bp, Artificial Sequence
  Description of Artificial Sequence: Synthetic probe
aaccccatatcacaaccattcattccctaaaaaatataaaaccctaacca

SEQ ID NO: 4249 - DNA, 50 bp, Artificial Sequence
  Description of Artificial Sequence: Synthetic probe
acaaatctacaaatctaatcactaaccacataaccaataacrctatacrc

SEQ ID NO: 4250 - DNA, 50 bp, Artificial Sequence
  Description of Artificial Sequence: Synthetic probe
tctatacaatttaccataaattatcttcctttcccataacttttaatacc

SEQ ID NO: 4251 - DNA, 50 bp, Artificial Sequence
  Description of Artificial Sequence: Synthetic probe
ttaacccttaatcatatttatttatttatcccraaacaaaatctcacccc

SEQ ID NO: 4252 - DNA, 50 bp, Artificial Sequence
  Description of Artificial Sequence: Synthetic probe
attaaaaatattaattactaatacttacttccataaacactcaaaaaaac

SEQ ID NO: 4253 - DNA, 50 bp, Artificial Sequence
  Description of Artificial Sequence: Synthetic probe
atattccattacccctcctatcctaaatctatattacraaaaacrctcrc

SEQ ID NO: 4254 - DNA, 50 bp, Artificial Sequence
  Description of Artificial Sequence: Synthetic probe
ctcctcttaccctcactaactcaaaatacacaaaaacctatcaaactcac

SEQ ID NO: 4255 - DNA, 50 bp, Artificial Sequence
  Description of Artificial Sequence: Synthetic probe
aattttagtgatagatttgttggattataagyggttgaatttttgttttg

SEQ ID NO: 4256 - DNA, 50 bp, Artificial Sequence
  Description of Artificial Sequence: Synthetic probe
atctcaataacaaacttactaaaccataaacractaaatttctactttac

SEQ ID NO: 4257 - DNA, 50 bp, Artificial Sequence
  Description of Artificial Sequence: Synthetic probe
taaaattaagtataattggtggaaatttagaggttttaatagtagggttt

SEQ ID NO: 4258 - DNA, 50 bp, Artificial Sequence
  Description of Artificial Sequence: Synthetic probe
aaaattaaacataactaacaaaaacccaaaaatcttaacaataaaattca

SEQ ID NO: 4259 - DNA, 50 bp, Artificial Sequence
  Description of Artificial Sequence: Synthetic probe
tttcactactttaccccaacattaaaatattaattcatctttcaacaaac

SEQ ID NO: 4260 - DNA, 50 bp, Artificial Sequence
  Description of Artificial Sequence: Synthetic probe
tcaacrttcraaaaacttattctctaaatccaaaatcttcctaatacatc

SEQ ID NO: 4261 - DNA, 50 bp, Artificial Sequence
  Description of Artificial Sequence: Synthetic probe
aactactactcacraatattaaaaaactccrcrttattcataactaaaac

SEQ ID NO: 4262 - DNA, 50 bp, Artificial Sequence
  Description of Artificial Sequence: Synthetic probe
tatcaataacctacaactcaaaaatatatcaattataaaaaataaactcc

SEQ ID NO: 4263 - DNA, 50 bp, Artificial Sequence
  Description of Artificial Sequence: Synthetic probe
ttgttaatgatttgtagtttaaagatatgttagttgtagagggtgggttt

SEQ ID NO: 4264 - DNA, 50 bp, Artificial Sequence
  Description of Artificial Sequence: Synthetic probe
ttctcccaaaacaacaattataatataatctattttaaaacccttcctac

SEQ ID NO: 4265 - DNA, 50 bp, Artificial Sequence
  Description of Artificial Sequence: Synthetic probe
agatatatatagagatttaygagttttatatattttggtttagggyggag

SEQ ID NO: 4266 - DNA, 50 bp, Artificial Sequence
  Description of Artificial Sequence: Synthetic probe
aacacacacaaaaacccacraactttacatactctaacccaaaacraaac

SEQ ID NO: 4267 - DNA, 50 bp, Artificial Sequence
  Description of Artificial Sequence: Synthetic probe
aaaaaatctaccrctttaaccttctaatcctaaaaacacacctaaatccc

SEQ ID NO: 4268 - DNA, 50 bp, Artificial Sequence
  Description of Artificial Sequence: Synthetic probe
aaaactacrtcttttaaattttctctctccraccraatacrataactcac

SEQ ID NO: 4269 - DNA, 50 bp, Artificial Sequence
  Description of Artificial Sequence: Synthetic probe
caccaaaaacaaaaatctaaaacaacccctcaaaaaacrataaacrtttc

SEQ ID NO: 4270 - DNA, 50 bp, Artificial Sequence
  Description of Artificial Sequence: Synthetic probe
gttattggtttagagggtttttgatgaatagatttagaaaatatgtgaag

SEQ ID NO: 4271 - DNA, 50 bp, Artificial Sequence
  Description of Artificial Sequence: Synthetic probe
taatatcaacacacccaacaaataaactactccctaaaccrcaaaacaac

SEQ ID NO: 4272 - DNA, 50 bp, Artificial Sequence
  Description of Artificial Sequence: Synthetic probe
caaaaacaacacaccaccctatttcttccctaaaaaccacttatctaaac

SEQ ID NO: 4273 - DNA, 50 bp, Artificial Sequence
  Description of Artificial Sequence: Synthetic probe
attcacactcctataaaaatctaataccaccactaatctaacaaaaaaca

SEQ ID NO: 4274 - DNA, 50 bp, Artificial Sequence
  Description of Artificial Sequence: Synthetic probe
aaacaaacaaatcataaaatcaaaaaatcaaaaccatcctaactaacaca

SEQ ID NO: 4275 - DNA, 50 bp, Artificial Sequence
  Description of Artificial Sequence: Synthetic probe
actataacracraccaattacrtaacraacctacraaactaaactaacac

SEQ ID NO: 4276 - DNA, 50 bp, Artificial Sequence
  Description of Artificial Sequence: Synthetic probe
caaacaaaaacctaaacctaaaacttccttaaattctaccttatatatcc

SEQ ID NO: 4277 - DNA, 50 bp, Artificial Sequence
  Description of Artificial Sequence: Synthetic probe
accaaaattaccaacaaccacacacataaatctaaactctaaaaaaaacc

SEQ ID NO: 4278 - DNA, 50 bp, Artificial Sequence
  Description of Artificial Sequence: Synthetic probe
aactatctcaataccccttaacraccrtataactcrctttctacaatacc

SEQ ID NO: 4279 - DNA, 50 bp, Artificial Sequence
  Description of Artificial Sequence: Synthetic probe
aaaaatactaacratatatataaataacactaccccctcrtcrtaacacc

SEQ ID NO: 4280 - DNA, 50 bp, Artificial Sequence
  Description of Artificial Sequence: Synthetic probe
cacatatattcttacttcctaatacttctctctcraaaaaatactaaatc

SEQ ID NO: 4281 - DNA, 50 bp, Artificial Sequence
  Description of Artificial Sequence: Synthetic probe
crtattaaatttccracrttccraaaaactaaactcttatcrcraatccc

SEQ ID NO: 4282 - DNA, 50 bp, Artificial Sequence
  Description of Artificial Sequence: Synthetic probe
cttttctatttcrcaaacrcaaaaaaaataaacraattaattccacttcc

SEQ ID NO: 4283 - DNA, 50 bp, Artificial Sequence
  Description of Artificial Sequence: Synthetic probe
aatcatactaccctccraaaatcaatttaaatatcrccrctccctttcac

SEQ ID NO: 4284 - DNA, 50 bp, Artificial Sequence
  Description of Artificial Sequence: Synthetic probe
tgttaagtagggttgttttaggtttttatgaaggtttttaggatgttatt

SEQ ID NO: 4285 - DNA, 50 bp, Artificial Sequence
  Description of Artificial Sequence: Synthetic probe
actaaataaaactacctcaaactcccataaaaattctcaaaatatcaccc

SEQ ID NO: 4286 - DNA, 50 bp, Artificial Sequence
  Description of Artificial Sequence: Synthetic probe
ctaaaactctaacaacctactccccracrctaaaccctaaaaaaccaaac

SEQ ID NO: 4287 - DNA, 50 bp, Artificial Sequence
  Description of Artificial Sequence: Synthetic probe
tactttataaattaatccacrcccrctacatccttaccaaccrtaacatc

SEQ ID NO: 4288 - DNA, 50 bp, Artificial Sequence
  Description of Artificial Sequence: Synthetic probe
aaaaaaatcaccctaccrccttcrttatcaattatacaacracactaccc

SEQ ID NO: 4289 - DNA, 50 bp, Artificial Sequence
  Description of Artificial Sequence: Synthetic probe
ctaaatactattactaatactaaactcaaaacctttaaaatctcraactc

SEQ ID NO: 4290 - DNA, 50 bp, Artificial Sequence
  Description of Artificial Sequence: Synthetic probe
aatctacaaaacataaaatactccataaataaaaacaataaatcttcccc

SEQ ID NO: 4291 - DNA, 50 bp, Artificial Sequence
  Description of Artificial Sequence: Synthetic probe
acctttaaaacaaaaaacaaaaacctcraaaaaaatacrcaaaccccaac

SEQ ID NO: 4292 - DNA, 50 bp, Artificial Sequence
  Description of Artificial Sequence: Synthetic probe
acaaaccaaaattatttcttcaaatcaaaaacttatctacraaaaacrac

SEQ ID NO: 4293 - DNA, 50 bp, Artificial Sequence
  Description of Artificial Sequence: Synthetic probe
aataattttaaaaaaatattataccaaccttccaaattctaaaactaaac

SEQ ID NO: 4294 - DNA, 50 bp, Artificial Sequence
  Description of Artificial Sequence: Synthetic probe
atcctaatcrccaaccrcctacaaaatcraaaattcctctcraaaaaatc

SEQ ID NO: 4295 - DNA, 50 bp, Artificial Sequence
  Description of Artificial Sequence: Synthetic probe
aaaaaacttaaatacaattctcaactttacacaaccaaaacttcccccrc

SEQ ID NO: 4296 - DNA, 50 bp, Artificial Sequence
  Description of Artificial Sequence: Synthetic probe
atttaccracacccaccaaaaaaacrttcttccctaaaactaaaataacc

SEQ ID NO: 4297 - DNA, 50 bp, Artificial Sequence
  Description of Artificial Sequence: Synthetic probe
ataatttaaaaaccactaactaaacaataaacctccttaaccrtaacttc

SEQ ID NO: 4298 - DNA, 50 bp, Artificial Sequence
  Description of Artificial Sequence: Synthetic probe
aaaaaaaacccrctaataaaaacrcraaactatttctcctccrtaattcc

SEQ ID NO: 4299 - DNA, 50 bp, Artificial Sequence
  Description of Artificial Sequence: Synthetic probe
ccacccttatacctaaacccaactcaaatctttctaaaactaaaaacacc

SEQ ID NO: 4300 - DNA, 50 bp, Artificial Sequence
  Description of Artificial Sequence: Synthetic probe
aaataaatccractccraactctcctaattaacraacrctaaaaaacrac

SEQ ID NO: 4301 - DNA, 50 bp, Artificial Sequence
  Description of Artificial Sequence: Synthetic probe
ccacrataataaaaaaaatatctaaaaacaccccrtccactattaccctc

SEQ ID NO: 4302 - DNA, 50 bp, Artificial Sequence
  Description of Artificial Sequence: Synthetic probe
rccctttttcattaactaaaaatttaactctaaactaacrcaaccaaccc

SEQ ID NO: 4303 - DNA, 50 bp, Artificial Sequence
  Description of Artificial Sequence: Synthetic probe
tactaataataccccaaccaattaactactcraacctacatttttcattc

SEQ ID NO: 4304 - DNA, 50 bp, Artificial Sequence
  Description of Artificial Sequence: Synthetic probe
acttattctcatattttctaaatccrcaattcaaacctattccaaaatac

SEQ ID NO: 4305 - DNA, 50 bp, Artificial Sequence
  Description of Artificial Sequence: Synthetic probe
ttttaggtttyggtatttttgtatatttttagaaattagttttggttggg

SEQ ID NO: 4306 - DNA, 50 bp, Artificial Sequence
  Description of Artificial Sequence: Synthetic probe
tttaaatttcratatctctacacactcttaaaaattaatcctaactaaac

SEQ ID NO: 4307 - DNA, 50 bp, Artificial Sequence
  Description of Artificial Sequence: Synthetic probe
atattctattacaattaacccaaaacctatttccaaaactctaccccctc

SEQ ID NO: 4308 - DNA, 50 bp, Artificial Sequence
  Description of Artificial Sequence: Synthetic probe
cccaaaacrtaataaaaatctccaaatcrctaaatatatcctattactcc

SEQ ID NO: 4309 - DNA, 50 bp, Artificial Sequence
  Description of Artificial Sequence: Synthetic probe
aactataaaacataaaaacrttaaatcccctcatcrccrttctaaaaccc

SEQ ID NO: 4310 - DNA, 50 bp, Artificial Sequence
  Description of Artificial Sequence: Synthetic probe
ttttcatttattaatctttatttctcctcctcaatcaccaataaaaaaac

SEQ ID NO: 4311 - DNA, 50 bp, Artificial Sequence
  Description of Artificial Sequence: Synthetic probe
tttcatttattaatctttatttctcctcctcaatcaccaataaaaaaaca

SEQ ID NO: 4312 - DNA, 50 bp, Artificial Sequence
  Description of Artificial Sequence: Synthetic probe
tccccatctttctccttatcctaaatcctcaaaatctaaaaatctctaac

SEQ ID NO: 4313 - DNA, 50 bp, Artificial Sequence
  Description of Artificial Sequence: Synthetic probe
aacaaaaaaaaactccactaaccactaaacttattcccaaactacatttc

SEQ ID NO: 4314 - DNA, 50 bp, Artificial Sequence
  Description of Artificial Sequence: Synthetic probe
taaataaaaaaaccttttctttcacatatatattacccatttaacctacc

SEQ ID NO: 4315 - DNA, 50 bp, Artificial Sequence
  Description of Artificial Sequence: Synthetic probe
ttaaaaatctcattaataaattccacatccaaaaaatacaaactataatc

SEQ ID NO: 4316 - DNA, 50 bp, Artificial Sequence
  Description of Artificial Sequence: Synthetic probe
aaaaaaacratttcctccrcctcttccaaaacrataaatttccttcctcc

SEQ ID NO: 4317 - DNA, 50 bp, Artificial Sequence
  Description of Artificial Sequence: Synthetic probe
aatttaggttttagttaaattgygagatattaygttatttaagaggtagg

SEQ ID NO: 4318 - DNA, 50 bp, Artificial Sequence
  Description of Artificial Sequence: Synthetic probe
attcaaatttcaaccaaactacraaataccacrttatttaaaaaacaaac

SEQ ID NO: 4319 - DNA, 50 bp, Artificial Sequence
  Description of Artificial Sequence: Synthetic probe
raaactctaacttcctaacaaaacrctcccraatcccaaaaactaaaacc

SEQ ID NO: 4320 - DNA, 50 bp, Artificial Sequence
  Description of Artificial Sequence: Synthetic probe
aaaaataaaaaccaatcrcaaaacttaatctataccttaatcttaactac

SEQ ID NO: 4321 - DNA, 50 bp, Artificial Sequence
  Description of Artificial Sequence: Synthetic probe
ataaatataaaatacracttcrctaatcctaacctaaatccaacraaaac

SEQ ID NO: 4322 - DNA, 50 bp, Artificial Sequence
  Description of Artificial Sequence: Synthetic probe
ttaaacttattaaatttcttctacaaaacctcctcttcctcrctcaatcc

SEQ ID NO: 4323 - DNA, 50 bp, Artificial Sequence
  Description of Artificial Sequence: Synthetic probe
gaatgttagtaaaaygtgggaattgagtttgtatgagttgtatyggattt

SEQ ID NO: 4324 - DNA, 50 bp, Artificial Sequence
  Description of Artificial Sequence: Synthetic probe
aataccaacaaaacrtaaaaactaaatctatataaactacaccraacccc

SEQ ID NO: 4325 - DNA, 50 bp, Artificial Sequence
  Description of Artificial Sequence: Synthetic probe
acctcaaactcccataaaaattctcaaaatatcacccrtactccacttac

SEQ ID NO: 4326 - DNA, 50 bp, Artificial Sequence
  Description of Artificial Sequence: Synthetic probe
acctaaaacaattactactactaaactaaaacaacaaaaccacaccaaac

SEQ ID NO: 4327 - DNA, 50 bp, Artificial Sequence
  Description of Artificial Sequence: Synthetic probe
aactaccraaaaactaaatttccrcaaacctaataaaaattccaactctc

SEQ ID NO: 4328 - DNA, 50 bp, Artificial Sequence
  Description of Artificial Sequence: Synthetic probe
tcatatctacttattacrtatttttcataccttccacctctctaaaaacc

SEQ ID NO: 4329 - DNA, 50 bp, Artificial Sequence
  Description of Artificial Sequence: Synthetic probe
ttataacaaaaaaacraaaccctacraaacraaaccraaacrccrtaaac

SEQ ID NO: 4330 - DNA, 50 bp, Artificial Sequence
  Description of Artificial Sequence: Synthetic probe
actaaataataatccaatcccaatctcctcactattcaaaaaccctacac

SEQ ID NO: 4331 - DNA, 50 bp, Artificial Sequence
  Description of Artificial Sequence: Synthetic probe
caaaaaattaaaattctaaacaactccrcaaaacctctaataatcctctc

SEQ ID NO: 4332 - DNA, 50 bp, Artificial Sequence
  Description of Artificial Sequence: Synthetic probe
acraaactaacctataattaaccacttaacrtcactcactaaataccrcc

SEQ ID NO: 4333 - DNA, 50 bp, Artificial Sequence
  Description of Artificial Sequence: Synthetic probe
aaaaacracraaaacraacctatcacctctaaaaaaactatacctataac

SEQ ID NO: 4334 - DNA, 50 bp, Artificial Sequence
  Description of Artificial Sequence: Synthetic probe
ccattaaatttttatctatataaaactaaaatcaattatataaatatccc

SEQ ID NO: 4335 - DNA, 50 bp, Artificial Sequence
  Description of Artificial Sequence: Synthetic probe
aattactaaaaataaccaaaacrtccaaaataccaaacatccctctccac

SEQ ID NO: 4336 - DNA, 50 bp, Artificial Sequence
  Description of Artificial Sequence: Synthetic probe
aaatcaaaaactaaatcctaattcctaactctccaacttccaatataatc

SEQ ID NO: 4337 - DNA, 50 bp, Artificial Sequence
  Description of Artificial Sequence: Synthetic probe
accrcraaataataccrcctttcrtaaatcttaatatcttatcttaaaac

SEQ ID NO: 4338 - DNA, 50 bp, Artificial Sequence
  Description of Artificial Sequence: Synthetic probe
tctaaataaccaataactcrcaacccccttccccrataaaaaaaacctac

SEQ ID NO: 4339 - DNA, 50 bp, Artificial Sequence
  Description of Artificial Sequence: Synthetic probe
accacataaacatatcttcracccacaccctaaataaaataaaaaatttc

SEQ ID NO: 4340 - DNA, 50 bp, Artificial Sequence
  Description of Artificial Sequence: Synthetic probe
tattatatgagtatattttyggtttatattttgaatgaagtgaggggttt

SEQ ID NO: 4341 - DNA, 50 bp, Artificial Sequence
  Description of Artificial Sequence: Synthetic probe
aaaaatctaaacrctaattaacctatttaccttcraaacraatccaaaac

SEQ ID NO: 4342 - DNA, 50 bp, Artificial Sequence
  Description of Artificial Sequence: Synthetic probe
craaacaaacaaacctattcctcttccctaaactacrattacracaaacc

SEQ ID NO: 4343 - DNA, 50 bp, Artificial Sequence
  Description of Artificial Sequence: Synthetic probe
aacraattacctaaaaaaaaccraaccraacrctaacrcrcraaataaac

SEQ ID NO: 4344 - DNA, 50 bp, Artificial Sequence
  Description of Artificial Sequence: Synthetic probe
atttatcatctttctaaacacttccccaaaacactcctttaattccaaac

SEQ ID NO: 4345 - DNA, 50 bp, Artificial Sequence
  Description of Artificial Sequence: Synthetic probe
tctccatatactccataaataacrctaacttatacccaaaactttacccc

SEQ ID NO: 4346 - DNA, 50 bp, Artificial Sequence
  Description of Artificial Sequence: Synthetic probe
aatcrtcratttaaatctaaaccccacttcctctatcctcaaccatctac

SEQ ID NO: 4347 - DNA, 50 bp, Artificial Sequence
  Description of Artificial Sequence: Synthetic probe
tcacaaaatcaaaaaatcaaaaccatcctaactaacacaataaaacccca

SEQ ID NO: 4348 - DNA, 50 bp, Artificial Sequence
  Description of Artificial Sequence: Synthetic probe
aaattcaccaaacacraaatacataactaaacctctctctaatcaataac

SEQ ID NO: 4349 - DNA, 50 bp, Artificial Sequence
  Description of Artificial Sequence: Synthetic probe
taacctttaaactcracttcaataccaaacraacaatcaaaaaataactc

SEQ ID NO: 4350 - DNA, 50 bp, Artificial Sequence
  Description of Artificial Sequence: Synthetic probe
accaaccraaaatattctatactacctaaaccctcraatatacacactac

SEQ ID NO: 4351 - DNA, 50 bp, Artificial Sequence
  Description of Artificial Sequence: Synthetic probe
aaatttatctcaatcaaaacatttttacrctcaaaataatataaaataac

SEQ ID NO: 4352 - DNA, 50 bp, Artificial Sequence
  Description of Artificial Sequence: Synthetic probe
aaaatgtaaaggtatattagttaattatttggtttattattggtagtggt

SEQ ID NO: 4353 - DNA, 50 bp, Artificial Sequence
  Description of Artificial Sequence: Synthetic probe
aaatacaaaaacatattaatcaaccacctaatttaccactaacaataatc

SEQ ID NO: 4354 - DNA, 50 bp, Artificial Sequence
  Description of Artificial Sequence: Synthetic probe
tataattcaaaaaaataaaccaataacccaaatcatccccaaatttctcc

SEQ ID NO: 4355 - DNA, 50 bp, Artificial Sequence
  Description of Artificial Sequence: Synthetic probe
taactaaacctaaaaaaaattactccccaaaataaaacrtcactactaac

SEQ ID NO: 4356 - DNA, 50 bp, Artificial Sequence
  Description of Artificial Sequence: Synthetic probe
tacaaaatacctaaattttctaactcttctcaaatcctccaaaaacacac

SEQ ID NO: 4357 - DNA, 50 bp, Artificial Sequence
  Description of Artificial Sequence: Synthetic probe
accataattctcacaccatccaaaaaaaacataactacaacataaaccca

SEQ ID NO: 4358 - DNA, 50 bp, Artificial Sequence
  Description of Artificial Sequence: Synthetic probe
aataaaaaaccatcaaatctcccacataaaacattttcraccctctctcc

SEQ ID NO: 4359 - DNA, 50 bp, Artificial Sequence
  Description of Artificial Sequence: Synthetic probe
aaaaaataaatatcccactcctatcattaatactttacataaaaatatcc

SEQ ID NO: 4360 - DNA, 50 bp, Artificial Sequence
  Description of Artificial Sequence: Synthetic probe
raaactcctattaaaaatccccccaactccttaataacaaccctaaacrc

SEQ ID NO: 4361 - DNA, 50 bp, Artificial Sequence
  Description of Artificial Sequence: Synthetic probe
ataagtatagagaattagtttgtaaaattgyggtgggggtaagtttagat

SEQ ID NO: 4362 - DNA, 50 bp, Artificial Sequence
  Description of Artificial Sequence: Synthetic probe
acatccaaatattctaacatttaacctaactccaacctcaacrcraaaac

SEQ ID NO: 4363 - DNA, 50 bp, Artificial Sequence
  Description of Artificial Sequence: Synthetic probe
ttttttacttctcaaattcctttcttatctattaaaaacrtatatcaaac

SEQ ID NO: 4364 - DNA, 50 bp, Artificial Sequence
  Description of Artificial Sequence: Synthetic probe
actcattccacttatatcttaaaaccaataattccaaacactatatcctc

SEQ ID NO: 4365 - DNA, 50 bp, Artificial Sequence
  Description of Artificial Sequence: Synthetic probe
taaaataactttccaaaaatcacaaaactaaaaaatatcacrttaaaaac

SEQ ID NO: 4366 - DNA, 50 bp, Artificial Sequence
  Description of Artificial Sequence: Synthetic probe
taaaaccataatccccttcaatataacaaatctacaaaaactctctacac

SEQ ID NO: 4367 - DNA, 50 bp, Artificial Sequence
  Description of Artificial Sequence: Synthetic probe
cctaaatacccaaatacctaatctaaaataaaaacccccttaatatttcc

SEQ ID NO: 4368 - DNA, 50 bp, Artificial Sequence
  Description of Artificial Sequence: Synthetic probe
agaattygtagagaattaggaatttataaagaatgggtattgagagagag

SEQ ID NO: 4369 - DNA, 50 bp, Artificial Sequence
  Description of Artificial Sequence: Synthetic probe
taaccctaaattccraaccccaatttcattaaataaacratcraaaaacc

SEQ ID NO: 4370 - DNA, 50 bp, Artificial Sequence
  Description of Artificial Sequence: Synthetic probe
acaattaaaaaacataaaccrtacatcaacaacaaactcctatacatccc

SEQ ID NO: 4371 - DNA, 50 bp, Artificial Sequence
  Description of Artificial Sequence: Synthetic probe
cccctcttctcactacctcaaaaaaaattcctaataataatacccacctc

SEQ ID NO: 4372 - DNA, 50 bp, Artificial Sequence
  Description of Artificial Sequence: Synthetic probe
tcrcaataaactctaaaacrcaaaattcaaaacrcttacratcrccraac

SEQ ID NO: 4373 - DNA, 50 bp, Artificial Sequence
  Description of Artificial Sequence: Synthetic probe
aaaaaaaaacracccaacrctatcacttacataacccaaaacraaactac

SEQ ID NO: 4374 - DNA, 50 bp, Artificial Sequence
  Description of Artificial Sequence: Synthetic probe
cttaaaacatccaaatattctaacatttaacctaactccaacctcaacrc

SEQ ID NO: 4375 - DNA, 50 bp, Artificial Sequence
  Description of Artificial Sequence: Synthetic probe
aaaatttatcrcctaaaaacccaaaaaaaacracctccccccaacttaac

SEQ ID NO: 4376 - DNA, 50 bp, Artificial Sequence
  Description of Artificial Sequence: Synthetic probe
aaaacrtaaaatctttttaaaatcatttaaccractctcttaattataac

SEQ ID NO: 4377 - DNA, 50 bp, Artificial Sequence
  Description of Artificial Sequence: Synthetic probe
acaaaatctacttcaaaaaattacctttataatcaaaccaactaaaactc

SEQ ID NO: 4378 - DNA, 50 bp, Artificial Sequence
  Description of Artificial Sequence: Synthetic probe
aaaaataacctaacataacctaacaccaaaataattattcttaataaaac

SEQ ID NO: 4379 - DNA, 50 bp, Artificial Sequence
  Description of Artificial Sequence: Synthetic probe
ttctaaaaatattttccaaaacaaaaacractatctccccaaacctacrc

SEQ ID NO: 4380 - DNA, 50 bp, Artificial Sequence
  Description of Artificial Sequence: Synthetic probe
tgagggtgatttgatataatttggtattaggatgattgtttttaatgaga

SEQ ID NO: 4381 - DNA, 50 bp, Artificial Sequence
  Description of Artificial Sequence: Synthetic probe
aaaaaaaaaacrtaaataactaaaaaacacacctccctaatataacraac

SEQ ID NO: 4382 - DNA, 50 bp, Artificial Sequence
  Description of Artificial Sequence: Synthetic probe
aatttccaacrcrcraaaaaaaatacctacrcraaactacrtaaaaaaac

SEQ ID NO: 4383 - DNA, 50 bp, Artificial Sequence
  Description of Artificial Sequence: Synthetic probe
aaaataataataaaaaacaaacrtaacrttatttcattacacracttctc

SEQ ID NO: 4384 - DNA, 50 bp, Artificial Sequence
  Description of Artificial Sequence: Synthetic probe
aattctttctatattatatcacaactaaactataacattcccctacaacc

SEQ ID NO: 4385 - DNA, 50 bp, Artificial Sequence
  Description of Artificial Sequence: Synthetic probe
taataactctaatatatcccaaataaaccacaattaattcaatcactatc

SEQ ID NO: 4386 - DNA, 50 bp, Artificial Sequence
  Description of Artificial Sequence: Synthetic probe
aaaaaaaatttaacaaaaatttaaactattttctcctacactatcacacc

SEQ ID NO: 4387 - DNA, 50 bp, Artificial Sequence
  Description of Artificial Sequence: Synthetic probe
acaaccctaaaaaaacatcaccaaaaccaaactaaacaaaaaccatatcc

SEQ ID NO: 4388 - DNA, 50 bp, Artificial Sequence
  Description of Artificial Sequence: Synthetic probe
ctacaccacttcaccaaaaaataatctctttctccttataaaacacttac

SEQ ID NO: 4389 - DNA, 50 bp, Artificial Sequence
  Description of Artificial Sequence: Synthetic probe
tactctaatataaataaaaaccacatccttcctaccccttctaaaactac

SEQ ID NO: 4390 - DNA, 50 bp, Artificial Sequence
  Description of Artificial Sequence: Synthetic probe
tgttagttttaggaatagttagagaggaaatgtaatgaatttatagtagt

SEQ ID NO: 4391 - DNA, 50 bp, Artificial Sequence
  Description of Artificial Sequence: Synthetic probe
aaataaaactcratacctataaatcacaaaaatacttaaaaatatatttc

SEQ ID NO: 4392 - DNA, 50 bp, Artificial Sequence
  Description of Artificial Sequence: Synthetic probe
taggtaagattygatgtttgtggattatagaagtatttggagatgtgttt

SEQ ID NO: 4393 - DNA, 50 bp, Artificial Sequence
  Description of Artificial Sequence: Synthetic probe
accraactaaaaaacaacraatactaaaaaaattaatacccraaatcccc

SEQ ID NO: 4394 - DNA, 50 bp, Artificial Sequence
  Description of Artificial Sequence: Synthetic probe
ttaaaacatattactaacttacatcttctctaattaaaaaaaatacatcc

SEQ ID NO: 4395 - DNA, 50 bp, Artificial Sequence
  Description of Artificial Sequence: Synthetic probe
ttaattatcaataactatattaaaaaattccaatcactacaaataaactc

SEQ ID NO: 4396 - DNA, 50 bp, Artificial Sequence
  Description of Artificial Sequence: Synthetic probe
atttcaaaaataaaaacracractccctaaaccacttttcrtattcatcc

SEQ ID NO: 4397 - DNA, 50 bp, Artificial Sequence
  Description of Artificial Sequence: Synthetic probe
ataaatcttcaaacatccaactaaaaactttaattctctaataccccacc

SEQ ID NO: 4398 - DNA, 50 bp, Artificial Sequence
  Description of Artificial Sequence: Synthetic probe
tcrctaaaacaaaactataatactatattcccttctaccacctaataacc

SEQ ID NO: 4399 - DNA, 50 bp, Artificial Sequence
  Description of Artificial Sequence: Synthetic probe
tttttccrtttcataaaaacaacaactatctactaataattcctaccrcc

SEQ ID NO: 4400 - DNA, 50 bp, Artificial Sequence
  Description of Artificial Sequence: Synthetic probe
aaaaataacaacccrccacatctccaaaccaattaactaaactataatcc

SEQ ID NO: 4401 - DNA, 50 bp, Artificial Sequence
  Description of Artificial Sequence: Synthetic probe
aactaaacacaaaaaaactattatacatcccaattacaaaactaaacaac

SEQ ID NO: 4402 - DNA, 50 bp, Artificial Sequence
  Description of Artificial Sequence: Synthetic probe
aaaaccaaaaacaaacaaaaacrccctctatctcctaaactaaaacaaac

SEQ ID NO: 4403 - DNA, 50 bp, Artificial Sequence
  Description of Artificial Sequence: Synthetic probe
acctataaacrcaaacrtccrtacttcaccraaaaaatctaaaaaaactc

SEQ ID NO: 4404 - DNA, 50 bp, Artificial Sequence
  Description of Artificial Sequence: Synthetic probe
atcacctccctaattataaaaacaacaacatactcaaattatacatcatc

SEQ ID NO: 4405 - DNA, 50 bp, Artificial Sequence
  Description of Artificial Sequence: Synthetic probe
ataaataaaaaacccaaaataaaaacccttttatcccrtacaatatacac

SEQ ID NO: 4406 - DNA, 50 bp, Artificial Sequence
  Description of Artificial Sequence: Synthetic probe
acctctaccataaaaaacaaaaaatccacctaactaaaacacaaaaccca

SEQ ID NO: 4407 - DNA, 50 bp, Artificial Sequence
  Description of Artificial Sequence: Synthetic probe
aaaaaaaatctacrctaatcractctaacrcccacataaaaactaaccac

SEQ ID NO: 4408 - DNA, 50 bp, Artificial Sequence
  Description of Artificial Sequence: Synthetic probe
craacrccttaaaattcrctattaaaaacatcrtcaactaccttacaacc

SEQ ID NO: 4409 - DNA, 50 bp, Artificial Sequence; identical to SEQ ID NO: 4408
  Description of Artificial Sequence: Synthetic probe

SEQ ID NO: 4410 - DNA, 50 bp, Artificial Sequence
  Description of Artificial Sequence: Synthetic probe
aaacaccttaaaattcactattaaaaacatcatcaactaccttacaacca

SEQ ID NO: 4411 - DNA, 50 bp, Artificial Sequence
  Description of Artificial Sequence: Synthetic probe
agggtattttggtatttttttattatgtgttttatttgtaggtaggaggt

SEQ ID NO: 4412 - DNA, 50 bp, Artificial Sequence
  Description of Artificial Sequence: Synthetic probe
tctctaaaacacaaataaaaaataatataaataataccccaacacacrac

SEQ ID NO: 4413 - DNA, 50 bp, Artificial Sequence
  Description of Artificial Sequence: Synthetic probe
aacratcrctaaaataaaaccaaataacaaaaaatttctaataaaccttc

SEQ ID NO: 4414 - DNA, 50 bp, Artificial Sequence
  Description of Artificial Sequence: Synthetic probe
ttaaatacctacccaatataatattctacttacaaaaaaccttatatacc

SEQ ID NO: 4415 - DNA, 50 bp, Artificial Sequence
  Description of Artificial Sequence: Synthetic probe
gggagatgaaagaatttaygttgtgattatttatgatagaaagtagagtt

SEQ ID NO: 4416 - DNA, 50 bp, Artificial Sequence
  Description of Artificial Sequence: Synthetic probe
aaaaataaaaaaatccacrttataatcatccataacaaaaaacaaaaccc

SEQ ID NO: 4417 - DNA, 50 bp, Artificial Sequence
  Description of Artificial Sequence: Synthetic probe
atctctcatacataacaaacaaatattcctccatactaaaatctcctaac

SEQ ID NO: 4418 - DNA, 50 bp, Artificial Sequence
  Description of Artificial Sequence: Synthetic probe
acrataactactacaaccaaaatacctacaaaaaccacataacttaccac

SEQ ID NO: 4419 - DNA, 50 bp, Artificial Sequence
  Description of Artificial Sequence: Synthetic probe
atttatttagtttatagggattgttatttgggagatttgtgtaatagygt

SEQ ID NO: 4420 - DNA, 50 bp, Artificial Sequence
  Description of Artificial Sequence: Synthetic probe
aaaacrcaataaaatattccattacccctcctatcctaaatctatattac

SEQ ID NO: 4421 - DNA, 50 bp, Artificial Sequence
  Description of Artificial Sequence: Synthetic probe
ctcctaaaaccctacaatcctaaaacaaaaacaaaatcaaaacacaactc

SEQ ID NO: 4422 - DNA, 50 bp, Artificial Sequence
  Description of Artificial Sequence: Synthetic probe
ttttttggagttttgtagttttggggtagagatagaattaggatatagtt

SEQ ID NO: 4423 - DNA, 50 bp, Artificial Sequence
  Description of Artificial Sequence: Synthetic probe
ttttccattaaaccttcrtcrattcactatattaaactacrcctcraaac

SEQ ID NO: 4424 - DNA, 50 bp, Artificial Sequence
  Description of Artificial Sequence: Synthetic probe
tcattaatcrataataaaaccaataaaaatcraccatctaaaaacccaac

SEQ ID NO: 4425 - DNA, 50 bp, Artificial Sequence
  Description of Artificial Sequence: Synthetic probe
tttttttattggattttygtyggtttattatgttaggttgygtttyggaa

SEQ ID NO: 4426 - DNA, 50 bp, Artificial Sequence
  Description of Artificial Sequence: Synthetic probe
tacactcttcaaaaaacctaaactactactcacraatattaaaaaactcc

SEQ ID NO: 4427 - DNA, 50 bp, Artificial Sequence
  Description of Artificial Sequence: Synthetic probe
tctctaaatccaaaatcttcctaatacatcrcctcaaccataaacaacrc

SEQ ID NO: 4428 - DNA, 50 bp, Artificial Sequence
  Description of Artificial Sequence: Synthetic probe
taaaactaatactctattttctccaatcrtcctccaaaaaaacrtccccc

SEQ ID NO: 4429 - DNA, 50 bp, Artificial Sequence
  Description of Artificial Sequence: Synthetic probe
ctataaatcctaattataaatacaacttctactacccccrtaacaaactc

SEQ ID NO: 4430 - DNA, 50 bp, Artificial Sequence
  Description of Artificial Sequence: Synthetic probe
taaaaccaaacaacrcattatataaaaatcccaaccaaacaacaactccc

SEQ ID NO: 4431 - DNA, 50 bp, Artificial Sequence
  Description of Artificial Sequence: Synthetic probe
ttctcctaactttcttttactatcrtatttttccaactcccttctactcc

SEQ ID NO: 4432 - DNA, 50 bp, Artificial Sequence
  Description of Artificial Sequence: Synthetic probe
craaactaacaattaccraaaataaaactacraaaaataaccrccrctac

SEQ ID NO: 4433 - DNA, 50 bp, Artificial Sequence
  Description of Artificial Sequence: Synthetic probe
tctactaaataacatctaaccaaaatcrccccctctatctactcaaaaac

SEQ ID NO: 4434 - DNA, 50 bp, Artificial Sequence
  Description of Artificial Sequence: Synthetic probe
ttaaaactataactttaaaaatacaccacracaactataattcaaaaatc

SEQ ID NO: 4435 - DNA, 50 bp, Artificial Sequence
  Description of Artificial Sequence: Synthetic probe
aattactataatcattaattttaaacaactactacactaataaacttccc

SEQ ID NO: 4436 - DNA, 50 bp, Artificial Sequence
  Description of Artificial Sequence: Synthetic probe
yggttttttgyggttaagatgttgtaaaaygtgattttttataataagta

SEQ ID NO: 4437 - DNA, 50 bp, Artificial Sequence
  Description of Artificial Sequence: Synthetic probe
rattccttacratcaaaatactacaaaacrtaactccccacaataaatac

SEQ ID NO: 4438 - DNA, 50 bp, Artificial Sequence
  Description of Artificial Sequence: Synthetic probe
accttcrtaacaaccaaatcrtacrcraatcatcctaaaattaataattc

SEQ ID NO: 4439 - DNA, 50 bp, Artificial Sequence
  Description of Artificial Sequence: Synthetic probe
accctaacaccaaaaaaattcatatcatcttcaactacaaaaacaaaaac

SEQ ID NO: 4440 - DNA, 50 bp, Artificial Sequence
  Description of Artificial Sequence: Synthetic probe
ataaatacctatactaaacccrtcctaaaacaaaaaatcaaaaacrcccc

SEQ ID NO: 4441 - DNA, 50 bp, Artificial Sequence
  Description of Artificial Sequence: Synthetic probe
aaaatcttcccaaacttccatacacaacccaactaaaaactaccaaactc

SEQ ID NO: 4442 - DNA, 50 bp, Artificial Sequence
  Description of Artificial Sequence: Synthetic probe
crtttccctactttaaccaataaaaaaactacraataacacracctactc

SEQ ID NO: 4443 - DNA, 50 bp, Artificial Sequence
  Description of Artificial Sequence: Synthetic probe
ctctataaaaaatataaataattctctattaaacttcctacaacatctac

SEQ ID NO: 4444 - DNA, 50 bp, Artificial Sequence
  Description of Artificial Sequence: Synthetic probe
ttttaaattttttatygagtygtttgagttttttagtataggttgttygg

SEQ ID NO: 4445 - DNA, 50 bp, Artificial Sequence
  Description of Artificial Sequence: Synthetic probe
attaaatcctaaactttaaaaatcttacaactaaataacaaaaattcacc

SEQ ID NO: 4446 - DNA, 50 bp, Artificial Sequence
  Description of Artificial Sequence: Synthetic probe
actacacaaccaactacaaaaactcaaaaacaacatccrtatattctacc

SEQ ID NO: 4447 - DNA, 50 bp, Artificial Sequence
  Description of Artificial Sequence: Synthetic probe
ccaacaccacaaaacacccttaaaaaattaaaataatctcataatcaaac

SEQ ID NO: 4448 - DNA, 50 bp, Artificial Sequence
  Description of Artificial Sequence: Synthetic probe
ttcctcccaattaatataaatattcaataattttactacaaaaatattac

SEQ ID NO: 4449 - DNA, 50 bp, Artificial Sequence
  Description of Artificial Sequence: Synthetic probe
aaygatttttagaatttggttgtttgagttatttgtgggtggttttttat

SEQ ID NO: 4450 - DNA, 50 bp, Artificial Sequence
  Description of Artificial Sequence: Synthetic probe
acracccccaaaatctaactatctaaattatctataaataactccctacc

SEQ ID NO: 4451 - DNA, 50 bp, Artificial Sequence
  Description of Artificial Sequence: Synthetic probe
aaatcatatcaaaaaaacaaactcacatataatcaaaaatatattaaatc

SEQ ID NO: 4452 - DNA, 50 bp, Artificial Sequence
  Description of Artificial Sequence: Synthetic probe
taaattatgttagaagaatagatttatatgtggttaaaaatgtgttggat

SEQ ID NO: 4453 - DNA, 50 bp, Artificial Sequence
  Description of Artificial Sequence: Synthetic probe
ccaaacttccatacacaacccaactaaaaactaccaaactcraacaaatc

SEQ ID NO: 4454 - DNA, 50 bp, Artificial Sequence
  Description of Artificial Sequence: Synthetic probe
tttaagtttttatgtatagtttaattggagattgttaagttygagtaggt

SEQ ID NO: 4455 - DNA, 50 bp, Artificial Sequence
  Description of Artificial Sequence: Synthetic probe
ctccttaaaaccractaaaacrcrtctaactacaaatcccraaaaacacc

SEQ ID NO: 4456 - DNA, 50 bp, Artificial Sequence
  Description of Artificial Sequence: Synthetic probe
taaaatcatcccttctctcccaaaactccatcttcttccaaataccttac

SEQ ID NO: 4457 - DNA, 50 bp, Artificial Sequence
  Description of Artificial Sequence: Synthetic probe
tagatatggtgttaagtaggtaagggttaattttaattattttgtttatt

SEQ ID NO: 4458 - DNA, 50 bp, Artificial Sequence
  Description of Artificial Sequence: Synthetic probe
aaacataataccaaacaaataaaaattaatctcaatcaccttattcaccc

SEQ ID NO: 4459 - DNA, 50 bp, Artificial Sequence
  Description of Artificial Sequence: Synthetic probe
aatctaaaaacaaatctacaaatctaatcactaaccacataaccaataac

SEQ ID NO: 4460 - DNA, 50 bp, Artificial Sequence
  Description of Artificial Sequence: Synthetic probe
tcacaaaatcaaaaaatcaaaaccatcctaactaacataataaaacccca

SEQ ID NO: 4461 - DNA, 50 bp, Artificial Sequence
  Description of Artificial Sequence: Synthetic probe
aataaaaaacccaaaaataaacccaaatacttacaaccaactaatcttca

SEQ ID NO: 4462 - DNA, 50 bp, Artificial Sequence
  Description of Artificial Sequence: Synthetic probe
tatcctctttccccctcctaatctctaaaaacaatatctatatataacac

SEQ ID NO: 4463 - DNA, 50 bp, Artificial Sequence
  Description of Artificial Sequence: Synthetic probe
caacccataaaaacatctccraatccttctatataacactaaaaaccccc

SEQ ID NO: 4464 - DNA, 50 bp, Artificial Sequence
  Description of Artificial Sequence: Synthetic probe
taaaaaaattataaataaataataacaaaccctctaaaatccttaaacac

SEQ ID NO: 4465 - DNA, 50 bp, Artificial Sequence
  Description of Artificial Sequence: Synthetic probe
ttgggaaaattataaatgggtgatagtaagttttttgaggtttttaaata

SEQ ID NO: 4466 - DNA, 50 bp, Artificial Sequence
  Description of Artificial Sequence: Synthetic probe
tcctaattcaaaaacaaaacccaaaacatctttctccactattaccaccc

SEQ ID NO: 4467 - DNA, 50 bp, Artificial Sequence
  Description of Artificial Sequence: Synthetic probe
ataataattattacaataaccccttaatcactatttaaaccaaaaaatac

SEQ ID NO: 4468 - DNA, 50 bp, Artificial Sequence
  Description of Artificial Sequence: Synthetic probe
tctatttaaactaaaaactttcaaaaaaaacaaatacatactcaaatccc

SEQ ID NO: 4469 - DNA, 50 bp, Artificial Sequence
  Description of Artificial Sequence: Synthetic probe
tactccaaaacraatttaatacaaacactcacaaccccctaaaatacrac

SEQ ID NO: 4470 - DNA, 50 bp, Artificial Sequence
  Description of Artificial Sequence: Synthetic probe
aataaaaaaccrtaattaccraaatacacaaaaatttactactaatatac

SEQ ID NO: 4471 - DNA, 50 bp, Artificial Sequence
  Description of Artificial Sequence: Synthetic probe
ctccraaaaacraactcrccraaactaacaattaccraaaataaaactac

SEQ ID NO: 4472 - DNA, 50 bp, Artificial Sequence
  Description of Artificial Sequence: Synthetic probe
aaaaaaaacratatcctaacattaaatccactttcctcccaaccttatac

SEQ ID NO: 4473 - DNA, 50 bp, Artificial Sequence
  Description of Artificial Sequence: Synthetic probe
aataacaattaaaaccttataaccacctaatataaataaataacaaaacc

SEQ ID NO: 4474 - DNA, 50 bp, Artificial Sequence
  Description of Artificial Sequence: Synthetic probe
cracaatctcccctacraaatatctaaaaaccctttctttaaaaatccac

SEQ ID NO: 4475 - DNA, 50 bp, Artificial Sequence
  Description of Artificial Sequence: Synthetic probe
atcacrtacctcaactcctaattcctaaaacctttctttccacaaatctc

SEQ ID NO: 4476 - DNA, 50 bp, Artificial Sequence
  Description of Artificial Sequence: Synthetic probe
aaaaaactacaactaatatatatataaaaacccatctaatccrtcctctc

SEQ ID NO: 4477 - DNA, 50 bp, Artificial Sequence
  Description of Artificial Sequence: Synthetic probe
taactacttctataaattaccaaattatcatatacaaatttcctaattcc

SEQ ID NO: 4478 - DNA, 50 bp, Artificial Sequence
  Description of Artificial Sequence: Synthetic probe
aaaatctaaacrtttcctttaatcraaacaattatattaaatccattacc

SEQ ID NO: 4479 - DNA, 50 bp, Artificial Sequence
  Description of Artificial Sequence: Synthetic probe
cactacaaactcraaaaaaacractaaaacrctctatcractataaacrc

SEQ ID NO: 4480 - DNA, 50 bp, Artificial Sequence
  Description of Artificial Sequence: Synthetic probe
tactacccrctaaaaccaatcataaaccraaacraaaaccatttccaaac

SEQ ID NO: 4481 - DNA, 50 bp, Artificial Sequence
  Description of Artificial Sequence: Synthetic probe
tttcttccctataactcaaccctaaaaaaatttcccttttaaaatcttac

SEQ ID NO: 4482 - DNA, 50 bp, Artificial Sequence
  Description of Artificial Sequence: Synthetic probe
aaaacaatcaatctaaaaaataaccttaatcccctaccctaccctaacac

SEQ ID NO: 4483 - DNA, 50 bp, Artificial Sequence
  Description of Artificial Sequence: Synthetic probe
ttccaaaactaaaccaatacctcccaaaattcaaccctaacacttatacc

SEQ ID NO: 4484 - DNA, 50 bp, Artificial Sequence
  Description of Artificial Sequence: Synthetic probe
aaaataaactaaatccataccraaaatttctccctaatttctcaaccccc

SEQ ID NO: 4485 - DNA, 50 bp, Artificial Sequence
  Description of Artificial Sequence: Synthetic probe
aaaaaacraaacraaaacracttataaacttccacacttttcctctcttc

SEQ ID NO: 4486 - DNA, 50 bp, Artificial Sequence
  Description of Artificial Sequence: Synthetic probe
tacaaaaacaaacacaatccactctaccctccttaaaatacraaaacttc

SEQ ID NO: 4487 - DNA, 50 bp, Artificial Sequence
  Description of Artificial Sequence: Synthetic probe
ataatcatacccttcctactacctcccacaaaccaataaataccaaaaac

SEQ ID NO: 4488 - DNA, 50 bp, Artificial Sequence
  Description of Artificial Sequence: Synthetic probe
ttagtttgttgagttgtatgtttagtttgtagaatttatatttaataggg

SEQ ID NO: 4489 - DNA, 50 bp, Artificial Sequence
  Description of Artificial Sequence: Synthetic probe
crcctaaacrcraaaatactccracrcatttaataaacccaaatttaaac

SEQ ID NO: 4490 - DNA, 50 bp, Artificial Sequence
  Description of Artificial Sequence: Synthetic probe
ttttataagtttaattttttygggagtttagggaygtattttgttgtgta

SEQ ID NO: 4491 - DNA, 50 bp, Artificial Sequence
  Description of Artificial Sequence: Synthetic probe
tttcccttccttacttcttaataaataatcaatttttttaaaatacraac

SEQ ID NO: 4492 - DNA, 50 bp, Artificial Sequence
  Description of Artificial Sequence: Synthetic probe
ttcccttccttacttcttaataaataatcaatttttttaaaatacaaaca

SEQ ID NO: 4493 - DNA, 50 bp, Artificial Sequence
  Description of Artificial Sequence: Synthetic probe
cacaaaataacccttttctaaaataacaccaatctcattaaccttaaaac

SEQ ID NO: 4494 - DNA, 50 bp, Artificial Sequence
  Description of Artificial Sequence: Synthetic probe
acaaaataacccttttctaaaataacaccaatctcattaaccttaaaaca

SEQ ID NO: 4495 - DNA, 50 bp, Artificial Sequence
  Description of Artificial Sequence: Synthetic probe
ccctactccaaaacraatttaatacaaacactcacaaccccctaaaatac

SEQ ID NO: 4496 - DNA, 50 bp, Artificial Sequence
  Description of Artificial Sequence: Synthetic probe
ataaaaaataattttcaactaaactccacatcaaaaaacaatacactcac

SEQ ID NO: 4497 - DNA, 50 bp, Artificial Sequence
  Description of Artificial Sequence: Synthetic probe
ttaaaccaaaacccaaaatcraacaaccacaaaaaatcaaacctatcaac

SEQ ID NO: 4498 - DNA, 50 bp, Artificial Sequence
  Description of Artificial Sequence: Synthetic probe
tcctttcttaaaactctaatattattactaaaaatcaaacaaatctttac

SEQ ID NO: 4499 - DNA, 50 bp, Artificial Sequence
  Description of Artificial Sequence: Synthetic probe
aaaaacraccaaaaaacraaccaaaaaaaaataatcctctacattttacc

SEQ ID NO: 4500 - DNA, 50 bp, Artificial Sequence
  Description of Artificial Sequence: Synthetic probe
taaaaaaaaactaactcttcaaaaaacratccccratctcaaacaccrtc

SEQ ID NO: 4501 - DNA, 50 bp, Artificial Sequence
  Description of Artificial Sequence: Synthetic probe
ggttygataagaagagggaatttttgtagattaatagygggttatattga

SEQ ID NO: 4502 - DNA, 50 bp, Artificial Sequence
  Description of Artificial Sequence: Synthetic probe
catttaacctcrctatttacaaccaattcaataaatttatatatttcacc

SEQ ID NO: 4503 - DNA, 50 bp, Artificial Sequence
  Description of Artificial Sequence: Synthetic probe
aaaaaacttacctcaaaactaaaaactcaaaactctttctaaaaaatcac

SEQ ID NO: 4504 - DNA, 50 bp, Artificial Sequence
  Description of Artificial Sequence: Synthetic probe
ttttttyggttggatggttaattagttttggtatgagagaatgttattgt

SEQ ID NO: 4505 - DNA, 50 bp, Artificial Sequence
  Description of Artificial Sequence: Synthetic probe
cttcccractaaataatcaattaactctaacataaaaaaatatcactacc

SEQ ID NO: 4506 - DNA, 50 bp, Artificial Sequence
  Description of Artificial Sequence: Synthetic probe
aaaaaaaaactcraacratatcaaaaacctcrtaatcaaattaaactaac

SEQ ID NO: 4507 - DNA, 50 bp, Artificial Sequence
  Description of Artificial Sequence: Synthetic probe
aaactccaaaaaaaaccacatttatcttattcattactataatcccctac

SEQ ID NO: 4508 - DNA, 50 bp, Artificial Sequence
  Description of Artificial Sequence: Synthetic probe
gtgtttagtaaagattttataggggtaaaaggttttataggtygtgttta

SEQ ID NO: 4509 - DNA, 50 bp, Artificial Sequence
  Description of Artificial Sequence: Synthetic probe
tactcaataaaaaccctacaaaaacaaaaaaccccacaaaccrtatccac

SEQ ID NO: 4510 - DNA, 50 bp, Artificial Sequence
  Description of Artificial Sequence: Synthetic probe
ttaaacctaaaacctaataaaacaccctcaaaattattttatatatatac

SEQ ID NO: 4511 - DNA, 50 bp, Artificial Sequence
  Description of Artificial Sequence: Synthetic probe
cccaccraaataccactacctaaacaatctcctacttccaaattactatc

SEQ ID NO: 4512 - DNA, 50 bp, Artificial Sequence
  Description of Artificial Sequence: Synthetic probe
acccctacaataacaaaatcataatccttaaattataaccaaatccaccc

SEQ ID NO: 4513 - DNA, 50 bp, Artificial Sequence
  Description of Artificial Sequence: Synthetic probe
aattaacttaaaaaaccrtatctcaacrctttaacctaacractttaaac

SEQ ID NO: 4514 - DNA, 50 bp, Artificial Sequence
  Description of Artificial Sequence: Synthetic probe
ccaaaaaaaccctccaaacaatatacaacataataaactaaccaaataac

SEQ ID NO: 4515 - DNA, 50 bp, Artificial Sequence
  Description of Artificial Sequence: Synthetic probe
attaagaaggttttttaggtagtgtatagtatgatgagttggttagatga

SEQ ID NO: 4516 - DNA, 50 bp, Artificial Sequence
  Description of Artificial Sequence: Synthetic probe
aaaaaaatccratatatattttacatatacaacataccrccattcaaacc

SEQ ID NO: 4517 - DNA, 50 bp, Artificial Sequence
  Description of Artificial Sequence: Synthetic probe
aatacaaaaaccaccaaccacatatatctactaaacactaaaatataacc

SEQ ID NO: 4518 - DNA, 50 bp, Artificial Sequence
  Description of Artificial Sequence: Synthetic probe
aaaaaaaacttaaattcraaccccctcrcaacctaaaatctcaatttacc

SEQ ID NO: 4519 - DNA, 50 bp, Artificial Sequence
  Description of Artificial Sequence: Synthetic probe
tgttaattttttyggagagtggagattgttattgtgtttattttataaag

SEQ ID NO: 4520 - DNA, 50 bp, Artificial Sequence
  Description of Artificial Sequence: Synthetic probe
aaatttaaacraaacraaaacaactccttcccttaatcatactaccctcc

SEQ ID NO: 4521 - DNA, 50 bp, Artificial Sequence
  Description of Artificial Sequence: Synthetic probe
aaaccrtaaaaataaaaaacacaaaaaacrtaacatttttccttaactac

SEQ ID NO: 4522 - DNA, 50 bp, Artificial Sequence
  Description of Artificial Sequence: Synthetic probe
aaacraacraaaacaactataattacrtacraaaaaccrataacrcaatc

SEQ ID NO: 4523 - DNA, 50 bp, Artificial Sequence
  Description of Artificial Sequence: Synthetic probe
acaactcatacaaactcaattcccacrttttactaacattctaaacattc

SEQ ID NO: 4524 - DNA, 50 bp, Artificial Sequence
  Description of Artificial Sequence: Synthetic probe
aacacaccactaaacrtaaaccttctaaacattccacaaaacataacatc

SEQ ID NO: 4525 - DNA, 50 bp, Artificial Sequence
  Description of Artificial Sequence: Synthetic probe
ttatatcttaaaaccaataattccaaacactatatcctcrtttaacatac

SEQ ID NO: 4526 - DNA, 50 bp, Artificial Sequence
  Description of Artificial Sequence: Synthetic probe
cattaaaaaacctccraaacaccttaatcctcaaacraacctaataaaac

SEQ ID NO: 4527 - DNA, 50 bp, Artificial Sequence
  Description of Artificial Sequence: Synthetic probe
ctaataatctaaccatatttcaacttattcttaaacttaatcaaaacaac

SEQ ID NO: 4528 - DNA, 50 bp, Artificial Sequence
  Description of Artificial Sequence: Synthetic probe
attaactcacrttacctctaacaatctcrataacaaaaacaaccccttac

SEQ ID NO: 4529 - DNA, 50 bp, Artificial Sequence
  Description of Artificial Sequence: Synthetic probe
aataaataaatataataaaacractttacaaactaacaccctattcacac

SEQ ID NO: 4530 - DNA, 50 bp, Artificial Sequence
  Description of Artificial Sequence: Synthetic probe
cctaaatcataaaatacaactaacacatcctaaaactcactaaaaactac

SEQ ID NO: 4531 - DNA, 50 bp, Artificial Sequence
  Description of Artificial Sequence: Synthetic probe
ctaaatcataaaatacaactaacacatcctaaaactcactaaaaactaca

SEQ ID NO: 4532 - DNA, 50 bp, Artificial Sequence
  Description of Artificial Sequence: Synthetic probe
ctctctactaatcccaactttacatactaaacactcttaccrttctaacc

SEQ ID NO: 4533 - DNA, 50 bp, Artificial Sequence
  Description of Artificial Sequence: Synthetic probe
tctctactaatcccaactttacatactaaacactcttaccattctaacca

SEQ ID NO: 4534 - DNA, 50 bp, Artificial Sequence
  Description of Artificial Sequence: Synthetic probe
accrctattaattaaaaaaacccraatccaacctaaaaatccracaaaac

SEQ ID NO: 4535 - DNA, 50 bp, Artificial Sequence
  Description of Artificial Sequence: Synthetic probe
craaaacttataaaatattacttaaaaaaacttctaacratccraaaacc

SEQ ID NO: 4536 - DNA, 50 bp, Artificial Sequence
  Description of Artificial Sequence: Synthetic probe
tygaggatttataagatgttatttaaaagggtttttaayggttygagaat

SEQ ID NO: 4537 - DNA, 50 bp, Artificial Sequence
  Description of Artificial Sequence: Synthetic probe
taatattgttttagattgtggggtatgggaaygttagatttttttatygt

SEQ ID NO: 4538 - DNA, 50 bp, Artificial Sequence
  Description of Artificial Sequence: Synthetic probe
ttcatctttcttatcacctctccttaccataaaacataattaataactac

SEQ ID NO: 4539 - DNA, 50 bp, Artificial Sequence
  Description of Artificial Sequence: Synthetic probe
crattcaatccccttaaaaaaatactctccatcacctaaaaaatacaaac

SEQ ID NO: 4540 - DNA, 50 bp, Artificial Sequence
  Description of Artificial Sequence: Synthetic probe
aaaaaaatcaaaaataacactaacataaataataaaattacacttctaac

SEQ ID NO: 4541 - DNA, 50 bp, Artificial Sequence
  Description of Artificial Sequence: Synthetic probe
atactcaaattaccccatctttaaccaataaaaacctcctaaccraacrc

SEQ ID NO: 4542 - DNA, 50 bp, Artificial Sequence
  Description of Artificial Sequence: Synthetic probe
taaccttaaaaaaaataaactaataatataactacatctaaatccctcac

SEQ ID NO: 4543 - DNA, 50 bp, Artificial Sequence
  Description of Artificial Sequence: Synthetic probe
aatactccracrcatttaataaacccaaatttaaacrccactacrcctac

SEQ ID NO: 4544 - DNA, 50 bp, Artificial Sequence
  Description of Artificial Sequence: Synthetic probe
accccrcaaaaaaaactatcraaacaaacractttaaccaactaatactc

SEQ ID NO: 4545 - DNA, 50 bp, Artificial Sequence
  Description of Artificial Sequence: Synthetic probe
ccaaacrtcactatcaataccctaaaacatctcttcctttctaataaacc

SEQ ID NO: 4546 - DNA, 50 bp, Artificial Sequence
  Description of Artificial Sequence: Synthetic probe
aaaatcccaccacttaaaaaaaaccaacaaatactttaacccaccaaccc

SEQ ID NO: 4547 - DNA, 50 bp, Artificial Sequence
  Description of Artificial Sequence: Synthetic probe
cttataactacattactccaatctattactatcatctcataatcctcttc

SEQ ID NO: 4548 - DNA, 50 bp, Artificial Sequence
  Description of Artificial Sequence: Synthetic probe
tatttgattagggtgggttttagatttaatgataaattatgagagagata

SEQ ID NO: 4549 - DNA, 50 bp, Artificial Sequence
  Description of Artificial Sequence: Synthetic probe
cttacaactcttcattctaaaatacrtataatacccttatctccaaaaac

SEQ ID NO: 4550 - DNA, 50 bp, Artificial Sequence
  Description of Artificial Sequence: Synthetic probe
aaaaataaataaatcactccctaaaaaatctcraaaaaaatctcctatac

SEQ ID NO: 4551 - DNA, 50 bp, Artificial Sequence
  Description of Artificial Sequence: Synthetic probe
tttttgattagaatggygttattttgyggtayggaagttatatagtaata

SEQ ID NO: 4552 - DNA, 50 bp, Artificial Sequence
  Description of Artificial Sequence: Synthetic probe
ttctaattaaaataacrccattttacratacraaaactacacaacaacac

SEQ ID NO: 4553 - DNA, 50 bp, Artificial Sequence
  Description of Artificial Sequence: Synthetic probe
aaaataccactaataaaaactatcacttaaaacttctaaaaatccaaaac

SEQ ID NO: 4554 - DNA, 50 bp, Artificial Sequence
  Description of Artificial Sequence: Synthetic probe
aggggtgttattaataagggttgttatttgaaatttttaagggtttaaga

SEQ ID NO: 4555 - DNA, 50 bp, Artificial Sequence
  Description of Artificial Sequence: Synthetic probe
atacraacaaaaaataatactaatcctacattcatccacrtctaattacc

SEQ ID NO: 4556 - DNA, 50 bp, Artificial Sequence
  Description of Artificial Sequence: Synthetic probe
tttcaacraaaacctctatactactctataatctctactaaaacataaac

SEQ ID NO: 4557 - DNA, 50 bp, Artificial Sequence
  Description of Artificial Sequence: Synthetic probe
taccaatatctaccaccttctacaaaataaaaccaatatcataaccctcc

SEQ ID NO: 4558 - DNA, 50 bp, Artificial Sequence
  Description of Artificial Sequence: Synthetic probe
tctaaaaaatccccaacaaaaactctcaacttatcttaaaacatctaaac

SEQ ID NO: 4559 - DNA, 50 bp, Artificial Sequence
  Description of Artificial Sequence: Synthetic probe
accaataaaaccaccaacttacttaccctaaataaccacatcccctaaac

SEQ ID NO: 4560 - DNA, 50 bp, Artificial Sequence
  Description of Artificial Sequence: Synthetic probe
aataaaaaacctctaaaacacatatcaaaaacccrtaaactacaaaaccc

SEQ ID NO: 4561 - DNA, 50 bp, Artificial Sequence
  Description of Artificial Sequence: Synthetic probe
acaatcaaaacaaataaaatccacaattcaaattcacaaaactaccaaac

SEQ ID NO: 4562 - DNA, 50 bp, Artificial Sequence
  Description of Artificial Sequence: Synthetic probe
aataacttatctacaactcccatattaactataccacaacctaacaaatc

SEQ ID NO: 4563 - DNA, 50 bp, Artificial Sequence
  Description of Artificial Sequence: Synthetic probe
aaaatttaaagttaaggtggtttttgtgtgattaaggattttttgtatat

SEQ ID NO: 4564 - DNA, 50 bp, Artificial Sequence
  Description of Artificial Sequence: Synthetic probe
aaatccaaaactaaaataactcttatataatcaaaaacctcttatacacc

SEQ ID NO: 4565 - DNA, 50 bp, Artificial Sequence
  Description of Artificial Sequence: Synthetic probe
ctcctttctttttattccttctccccaaatataataaacaattcctctcc

SEQ ID NO: 4566 - DNA, 50 bp, Artificial Sequence
  Description of Artificial Sequence: Synthetic probe
actctacactacttaaatttctaaataaacatactctaaaaaacaactcc

SEQ ID NO: 4567 - DNA, 50 bp, Artificial Sequence
  Description of Artificial Sequence: Synthetic probe
ccatatctttactattataaataatactacaataaacatacatatacaca

SEQ ID NO: 4568 - DNA, 50 bp, Artificial Sequence
  Description of Artificial Sequence: Synthetic probe
cratcttaaaaactacaactaccractacrtatactaaaaaacraaatcc

SEQ ID NO: 4569 - DNA, 50 bp, Artificial Sequence
  Description of Artificial Sequence: Synthetic probe
ataaatacaatataaacatctacacaaataaaaccctaaaaatataaccc

SEQ ID NO: 4570 - DNA, 50 bp, Artificial Sequence
  Description of Artificial Sequence: Synthetic probe
ataggttaaatagttttaatagttttatttygtagggtttggttttgggt

SEQ ID NO: 4571 - DNA, 50 bp, Artificial Sequence
  Description of Artificial Sequence: Synthetic probe
caaactaaataatttcaacaatcccatctcrcaaaacctaatcctaaacc

SEQ ID NO: 4572 - DNA, 50 bp, Artificial Sequence
  Description of Artificial Sequence: Synthetic probe
tgtgggtgtagtgtagatatttatataagtaaaattttggaagtataatt

SEQ ID NO: 4573 - DNA, 50 bp, Artificial Sequence
  Description of Artificial Sequence: Synthetic probe
craaaaataaaacrcaataaaactaaaaaccraccctaaactcrtcctac

SEQ ID NO: 4574 - DNA, 50 bp, Artificial Sequence
  Description of Artificial Sequence: Synthetic probe
tcrataaaaaaccacccacaaataactcaaacaaccaaattctaaaaatc

SEQ ID NO: 4575 - DNA, 50 bp, Artificial Sequence
  Description of Artificial Sequence: Synthetic probe
taaaattctaaaatatccattcttaattaaatctcatttcctatcatatc

SEQ ID NO: 4576 - DNA, 50 bp, Artificial Sequence
  Description of Artificial Sequence: Synthetic probe
aacaacttaaacaaaacttataaacaccraaaccraacttaaaacctaac

SEQ ID NO: 4577 - DNA, 50 bp, Artificial Sequence
  Description of Artificial Sequence: Synthetic probe
caattaaaataaaaaacrcraaacracrctatcaccrcattctataaacc

SEQ ID NO: 4578 - DNA, 50 bp, Artificial Sequence
  Description of Artificial Sequence: Synthetic probe
tattaactaaaataatctcaatctcctaaccttataatccacacacctca

SEQ ID NO: 4579 - DNA, 50 bp, Artificial Sequence
  Description of Artificial Sequence: Synthetic probe
tcataacraattaaaaaaactaataccccactcaaaatcccacrccrctc

SEQ ID NO: 4580 - DNA, 50 bp, Artificial Sequence
  Description of Artificial Sequence: Synthetic probe
acrccaaaaatcttaaacactttctaaatacctaacaatacactaaacrc

SEQ ID NO: 4581 - DNA, 50 bp, Artificial Sequence
  Description of Artificial Sequence: Synthetic probe
tgattaaaatattttgttttygattatgttttgttagaggaaaaggtgag

SEQ ID NO: 4582 - DNA, 50 bp, Artificial Sequence
  Description of Artificial Sequence: Synthetic probe
caaacctaataaacaaatctcraacctccatccatcraaaaaacatcccc

SEQ ID NO: 4583 - DNA, 50 bp, Artificial Sequence
  Description of Artificial Sequence: Synthetic probe
ctctttttactaaactataaccaaactaaccaactaaatattaactaaac

SEQ ID NO: 4584 - DNA, 50 bp, Artificial Sequence
  Description of Artificial Sequence: Synthetic probe
ttttctccttatcatttacctaccataaataattaaacaaatacttcctc

SEQ ID NO: 4585 - DNA, 50 bp, Artificial Sequence
  Description of Artificial Sequence: Synthetic probe
tgtgtttagtgatattttagtattgtttagttttaggggttgagttaagg

SEQ ID NO: 4586 - DNA, 50 bp, Artificial Sequence
  Description of Artificial Sequence: Synthetic probe
atacccaataacactccaatactatccaatctcaaaaactaaaccaaaac

SEQ ID NO: 4587 - DNA, 50 bp, Artificial Sequence
  Description of Artificial Sequence: Synthetic probe
cactttctacaaccatatactaaactcatcactaaatattcctttataac

SEQ ID NO: 4588 - DNA, 50 bp, Artificial Sequence
  Description of Artificial Sequence: Synthetic probe
tcacctctaaaatcraaataatctaatacctacttcacaaacrcttatac

SEQ ID NO: 4589 - DNA, 50 bp, Artificial Sequence
  Description of Artificial Sequence: Synthetic probe
aaacacaatcaaaacaaataacrcccataattcaaattcacaaaactacc

SEQ ID NO: 4590 - DNA, 50 bp, Artificial Sequence
  Description of Artificial Sequence: Synthetic probe
taaaatttaaaaataattccccactccacaacctaacrcatcractctac

SEQ ID NO: 4591 - DNA, 50 bp, Artificial Sequence
  Description of Artificial Sequence: Synthetic probe
cttcaaactttcttaacatttaaacatttcttttctccrcttcaataacc

SEQ ID NO: 4592 - DNA, 50 bp, Artificial Sequence
  Description of Artificial Sequence: Synthetic probe
tagtgaatgagaattatagtttggttttgtgagatttttatgaattaagg

SEQ ID NO: 4593 - DNA, 50 bp, Artificial Sequence
  Description of Artificial Sequence: Synthetic probe
cttccacaataattaaactaatttacactcccaccaacaatatataaaca

SEQ ID NO: 4594 - DNA, 50 bp, Artificial Sequence
  Description of Artificial Sequence: Synthetic probe
catccaacctacrtcrcaacccatcattacaatcaaataaaaacaaaatc

SEQ ID NO: 4595 - DNA, 50 bp, Artificial Sequence
  Description of Artificial Sequence: Synthetic probe
aatctcccaaataacaatccctataaactaaataaatcacrtctcccacc

SEQ ID NO: 4596 - DNA, 50 bp, Artificial Sequence
  Description of Artificial Sequence: Synthetic probe
atatttagtttgygtygtagtttattattgtaattaagtggagatagagt

SEQ ID NO: 4597 - DNA, 50 bp, Artificial Sequence
  Description of Artificial Sequence: Synthetic probe
acraaactacratcaccaaaacctaatactacracrttcctacaaatttc

SEQ ID NO: 4598 - DNA, 50 bp, Artificial Sequence
  Description of Artificial Sequence: Synthetic probe
ccrctaaatcacracacraattccaatcttaccataactacaacacaaac

SEQ ID NO: 4599 - DNA, 50 bp, Artificial Sequence
  Description of Artificial Sequence: Synthetic probe
gtygttggattayggtayggattttagttttattatggttgtagtataag

SEQ ID NO: 4600 - DNA, 50 bp, Artificial Sequence
  Description of Artificial Sequence: Synthetic probe
craaaattctaaaaatctcctccctccctaaaactataaactaaaccatc

SEQ ID NO: 4601 - DNA, 50 bp, Artificial Sequence
  Description of Artificial Sequence: Synthetic probe
tyggttgagtttygttttttgtaggtaaggaaataaaattgaaagttttt

SEQ ID NO: 4602 - DNA, 50 bp, Artificial Sequence
  Description of Artificial Sequence: Synthetic probe
atactacatcaaaattttactaatttattcttcctaaaacaacaacctcc

SEQ ID NO: 4603 - DNA, 50 bp, Artificial Sequence
  Description of Artificial Sequence: Synthetic probe
aattctaaaatatccattcttaattaaatctcatttcctatcatatcrac

SEQ ID NO: 4604 - DNA, 50 bp, Artificial Sequence
  Description of Artificial Sequence: Synthetic probe
acctatcatcattaaatataaacacaacttctacaaaacttacatcaccc

SEQ ID NO: 4605 - DNA, 50 bp, Artificial Sequence
  Description of Artificial Sequence: Synthetic probe
ataactatttaattatatcaactcttctaattaaaataacrccattttac

SEQ ID NO: 4606 - DNA, 50 bp, Artificial Sequence
  Description of Artificial Sequence: Synthetic probe
aaaatctcraaaaaaatctcctatacrtattactatataacttccrtacc

SEQ ID NO: 4607 - DNA, 50 bp, Artificial Sequence
  Description of Artificial Sequence: Synthetic probe
tgtggttatttgattgtgttaatttttttgattagaatggygttattttg

SEQ ID NO: 4608 - DNA, 50 bp, Artificial Sequence
  Description of Artificial Sequence: Synthetic probe
tcaaaaaacctcraaaactctctacrtctctaaaaacaaaaacactacac

SEQ ID NO: 4609 - DNA, 50 bp, Artificial Sequence
  Description of Artificial Sequence: Synthetic probe
ccctatttttactcaactttttactcaaaaacctcaactataaatacaac

SEQ ID NO: 4610 - DNA, 50 bp, Artificial Sequence
  Description of Artificial Sequence: Synthetic probe
atttcaccatattaaccaaaataatctcaatctcctaacctcataatcca

SEQ ID NO: 4611 - DNA, 50 bp, Artificial Sequence
  Description of Artificial Sequence: Synthetic probe
aaataccctattttatatttccaaatacattacacaaaaattccaatttc

SEQ ID NO: 4612 - DNA, 50 bp, Artificial Sequence
  Description of Artificial Sequence: Synthetic probe
aaaaaatttaaaactataaatacttacctttcaaacctccctctaaacac

SEQ ID NO: 4613 - DNA, 50 bp, Artificial Sequence
  Description of Artificial Sequence: Synthetic probe
atatcttccaataatataatctcatttacctttaaaaacattctatcacc

SEQ ID NO: 4614 - DNA, 50 bp, Artificial Sequence
  Description of Artificial Sequence: Synthetic probe
acrcaaaaataaacacaacaaaaaaccaaaccrtatatactaaacaacac

SEQ ID NO: 4615 - DNA, 50 bp, Artificial Sequence
  Description of Artificial Sequence: Synthetic probe
attgagtttgygttatgagtatttaggaagaaggatatatgattaggtta

SEQ ID NO: 4616 - DNA, 50 bp, Artificial Sequence
  Description of Artificial Sequence: Synthetic probe
tcctcrataaatataaaatacracttcrctaatcctaacctaaatccaac

SEQ ID NO: 4617 - DNA, 50 bp, Artificial Sequence
  Description of Artificial Sequence: Synthetic probe
ctcataatctaaaatcccaaatacctttatacaaccacaaaaaaataaac

SEQ ID NO: 4618 - DNA, 50 bp, Artificial Sequence
  Description of Artificial Sequence: Synthetic probe
tygttggttggtatttgttttttggttgaaaagaattgataaattgtttt

SEQ ID NO: 4619 - DNA, 50 bp, Artificial Sequence
  Description of Artificial Sequence: Synthetic probe
crttaactaatatctatttcctaactaaaaaaaactaacaaactattctc

SEQ ID NO: 4620 - DNA, 50 bp, Artificial Sequence
  Description of Artificial Sequence: Synthetic probe
gtttatggtttgagattttaaatgtttttgtgtagttataggaaggtgaa

SEQ ID NO: 4621 - DNA, 50 bp, Artificial Sequence
  Description of Artificial Sequence: Synthetic probe
aataaataaaaacatactcaacrccaaattcattcraaacctacaaaaac

SEQ ID NO: 4622 - DNA, 50 bp, Artificial Sequence
  Description of Artificial Sequence: Synthetic probe
ctttaaaaatatttaacraaactacratcaccaaaacctaatactacrac

SEQ ID NO: 4623 - DNA, 50 bp, Artificial Sequence
  Description of Artificial Sequence: Synthetic probe
ccccatcctaataaataaaaaaacatcaaacctactatcacrattctctc

SEQ ID NO: 4624 - DNA, 50 bp, Artificial Sequence
  Description of Artificial Sequence: Synthetic probe
aaatcttcttatccttatctaacaaacttattatacattctttcaacttc

SEQ ID NO: 4625 - DNA, 50 bp, Artificial Sequence
  Description of Artificial Sequence: Synthetic probe
cataaccaaaacactaccacacractaatataacaacttaaaacaactac

SEQ ID NO: 4626 - DNA, 50 bp, Artificial Sequence
  Description of Artificial Sequence: Synthetic probe
atggaatagtttattagygattgattgaagtttagagtagatttggggtt

SEQ ID NO: 4627 - DNA, 50 bp, Artificial Sequence
  Description of Artificial Sequence: Synthetic probe
ttcraataaccctaaaactatctattaacaaatccctcaaccrttaaaac

SEQ ID NO: 4628 - DNA, 50 bp, Artificial Sequence
  Description of Artificial Sequence: Synthetic probe
cttaaaaaaaaccraaacacacataaacactaattcaaaaacccaaaaac

SEQ ID NO: 4629 - DNA, 50 bp, Artificial Sequence
  Description of Artificial Sequence: Synthetic probe
aaaaaacaaacctaaaaaaactctacracccrcttaaaaccacaaaactc

SEQ ID NO: 4630 - DNA, 50 bp, Artificial Sequence
  Description of Artificial Sequence: Synthetic probe
aataaaaaacaaacacaacacattataatataaaaacaactaaatactac

SEQ ID NO: 4631 - DNA, 50 bp, Artificial Sequence
  Description of Artificial Sequence: Synthetic probe
aaacattcaactctatacacacaaataaaccttaaacttacaaaaactac

SEQ ID NO: 4632 - DNA, 50 bp, Artificial Sequence
  Description of Artificial Sequence: Synthetic probe
taataggggatagatatagtatattgtggtatggggataattgaatatta

SEQ ID NO: 4633 - DNA, 50 bp, Artificial Sequence
  Description of Artificial Sequence: Synthetic probe
atatcacatttccatttccacaattataatacttttcatttacccataac

SEQ ID NO: 4634 - DNA, 50 bp, Artificial Sequence
  Description of Artificial Sequence: Synthetic probe
aaaaatttctaattattaattataactcaataacttaaaatatcaaaacc

SEQ ID NO: 4635 - DNA, 50 bp, Artificial Sequence
  Description of Artificial Sequence: Synthetic probe
tttgtttgtaggaaaaaaggaatttttttggtagttattgtttgtaattg

SEQ ID NO: 4636 - DNA, 50 bp, Artificial Sequence
  Description of Artificial Sequence: Synthetic probe
ttaaaaattcttactaactttacccatatattacctataaaacaataacc

SEQ ID NO: 4637 - DNA, 50 bp, Artificial Sequence
  Description of Artificial Sequence: Synthetic probe
aaatttttttcaaatattaaccctctttctatcaacctaaataaaataac

SEQ ID NO: 4638 - DNA, 50 bp, Artificial Sequence
  Description of Artificial Sequence: Synthetic probe
caaatctctactcaaatatcacttattctaaaaaatcrttcctaaccacc

SEQ ID NO: 4639 - DNA, 50 bp, Artificial Sequence
  Description of Artificial Sequence: Synthetic probe
acacraccccacacactccttaccctactaaattatattctaataaaaac

SEQ ID NO: 4640 - DNA, 50 bp, Artificial Sequence
  Description of Artificial Sequence: Synthetic probe
atatctactaaataccraactataaatccccaaaaataccaaataaacac

SEQ ID NO: 4641 - DNA, 50 bp, Artificial Sequence
  Description of Artificial Sequence: Synthetic probe
aaaaatatataaaatcrtattcacctaatatctctaaaaacctacaaccc

SEQ ID NO: 4642 - DNA, 50 bp, Artificial Sequence
  Description of Artificial Sequence: Synthetic probe
ctacaccaaaccacrccrataaaattatttctcctctaaaaaaaacattc

SEQ ID NO: 4643 - DNA, 50 bp, Artificial Sequence
  Description of Artificial Sequence: Synthetic probe
aaaataaaataaaacrcccaaccrcctacraattaacaacaaaacctaac

SEQ ID NO: 4644 - DNA, 50 bp, Artificial Sequence
  Description of Artificial Sequence: Synthetic probe
aaattatttctcctctaaaaaaaacattcrctaaaccttattaccaaccc

SEQ ID NO: 4645 - DNA, 50 bp, Artificial Sequence
  Description of Artificial Sequence: Synthetic probe
tttctcctctaaaaaaaacattcrctaaaccttattaccaacccrcaaac

SEQ ID NO: 4646 - DNA, 50 bp, Artificial Sequence
  Description of Artificial Sequence: Synthetic probe
ctaaaaaaaacattcrctaaaccttattaccaacccrcaaacractaaac

SEQ ID NO: 4647 - DNA, 50 bp, Artificial Sequence
  Description of Artificial Sequence: Synthetic probe
tccaaccaaaataactaataaaaatcaaactctcraaaacrcattaccac

SEQ ID NO: 4648 - DNA, 50 bp, Artificial Sequence
  Description of Artificial Sequence: Synthetic probe
taaaaatcaaactctcraaaacrcattaccacraaacaacrtatataaac

SEQ ID NO: 4649 - DNA, 50 bp, Artificial Sequence
  Description of Artificial Sequence: Synthetic probe
aaaatcaaactctcraaaacrcattaccacraaacaacrtatataaacrc

SEQ ID NO: 4650 - DNA, 50 bp, Artificial Sequence
  Description of Artificial Sequence: Synthetic probe
cactaaataaacraatatatatataaccrccrccctccaaaaaaacracc

SEQ ID NO: 4651 - DNA, 50 bp, Artificial Sequence
  Description of Artificial Sequence: Synthetic probe
rctaaaaaaccaaccaaaataaatcactcccraccrcttccctaaaaaac

SEQ ID NO: 4652 - DNA, 50 bp, Artificial Sequence
  Description of Artificial Sequence: Synthetic probe
craaaaactaaattcraaactaacaaaacracraaaccaatatcrcccrc

SEQ ID NO: 4653 - DNA, 50 bp, Artificial Sequence
  Description of Artificial Sequence: Synthetic probe
aaaactaaattcraaactaacaaaacracraaaccaatatcrcccrcrac

SEQ ID NO: 4654 - DNA, 50 bp, Artificial Sequence
  Description of Artificial Sequence: Synthetic probe
aaccraccataaaatcrtccrcrttcaactccccattaataaaattcaac

SEQ ID NO: 4655 - DNA, 50 bp, Artificial Sequence
  Description of Artificial Sequence: Synthetic probe
tttttagttttagtttygggataaagattagtygtatagtaaaaattagg

SEQ ID NO: 4656 - DNA, 50 bp, Artificial Sequence
  Description of Artificial Sequence: Synthetic probe
ttttagttttagttttgggataaagattagttgtatagtaaaaattaggt

SEQ ID NO: 4657 - DNA, 50 bp, Artificial Sequence
  Description of Artificial Sequence: Synthetic probe
tttaaagaattaagattyggttagtaatggagtttagaatttttggtttt

SEQ ID NO: 4658 - DNA, 50 bp, Artificial Sequence
  Description of Artificial Sequence: Synthetic probe
ccaaaaaatcaaaacccratcaacaataaaacccaaaacctctaaccccc

SEQ ID NO: 4659 - DNA, 50 bp, Artificial Sequence
  Description of Artificial Sequence: Synthetic probe
aaaaatctctccattccttaacccaaatataacaacaaaaaaaaacctac

SEQ ID NO: 4660 - DNA, 50 bp, Artificial Sequence
  Description of Artificial Sequence: Synthetic probe
rcraaactcracracrccatttcrtactaaaataaaacaacctctaaaac

SEQ ID NO: 4661 - DNA, 50 bp, Artificial Sequence
  Description of Artificial Sequence: Synthetic probe
aacctatttaaataatcttctatataaacatatataacaatcaaaaattc

SEQ ID NO: 4662 - DNA, 50 bp, Artificial Sequence
  Description of Artificial Sequence: Synthetic probe
aagtttgtttaggtggttttttatatggatatgtatgatagttaggagtt

SEQ ID NO: 4663 - DNA, 50 bp, Artificial Sequence
  Description of Artificial Sequence: Synthetic probe
ccaaacaaaaacactcctcacatcccaaacaaaacaacaaaacaaaaaca

SEQ ID NO: 4664 - DNA, 50 bp, Artificial Sequence
  Description of Artificial Sequence: Synthetic probe
ttcctaatactaaaaacaaaaaccaactacccrcatactatctcccrtac

SEQ ID NO: 4665 - DNA, 50 bp, Artificial Sequence
  Description of Artificial Sequence: Synthetic probe
ataaaaataaattataataacraccccraacractcraaaactctatatc

SEQ ID NO: 4666 - DNA, 50 bp, Artificial Sequence
  Description of Artificial Sequence: Synthetic probe
crtactaaaataaaacaacctctaaaacraactaaaaaattctacctacc

SEQ ID NO: 4667 - DNA, 50 bp, Artificial Sequence
  Description of Artificial Sequence: Synthetic probe
ccccaaaaaattacaacrcaaccactactaaaacrtaaaatccccracac

SEQ ID NO: 4668 - DNA, 50 bp, Artificial Sequence
  Description of Artificial Sequence: Synthetic probe
atacaataccccrcccctaaaaacrtaaccaataatcctattattaaaac

SEQ ID NO: 4669 - DNA, 50 bp, Artificial Sequence
  Description of Artificial Sequence: Synthetic probe
tttttaagaggttgtagygtaattattattggaaygtgaagttttyggta

SEQ ID NO: 4670 - DNA, 50 bp, Artificial Sequence
  Description of Artificial Sequence: Synthetic probe
aaaatccaaaaatacaaacacaaaaaccctaacccctcacatctaaaacc

SEQ ID NO: 4671 - DNA, 50 bp, Artificial Sequence
  Description of Artificial Sequence: Synthetic probe
accaaaaaaaaccaaatattaaatcraaaccttaactctccctctcaaac

SEQ ID NO: 4672 - DNA, 50 bp, Artificial Sequence
  Description of Artificial Sequence: Synthetic probe
aaacctcttaaataccccaaacaattaaaataccacttctaataaaacac

SEQ ID NO: 4673 - DNA, 50 bp, Artificial Sequence
  Description of Artificial Sequence: Synthetic probe
attactaatacttacttccataaacactcaaaaaaacrcttcatatttac

SEQ ID NO: 4674 - DNA, 50 bp, Artificial Sequence
  Description of Artificial Sequence: Synthetic probe
atacaacacaccaacataacacatatatacatatataacaaacctacaca

SEQ ID NO: 4675 - DNA, 50 bp, Artificial Sequence
  Description of Artificial Sequence: Synthetic probe
aaacctaaccttataacactaacctaacctctactaccaaactaaaaacc

SEQ ID NO: 4676 - DNA, 50 bp, Artificial Sequence
  Description of Artificial Sequence: Synthetic probe
aacraaccrtacacrccttcctacactaaaaatttcaatataattctcac

SEQ ID NO: 4677 - DNA, 50 bp, Artificial Sequence
  Description of Artificial Sequence: Synthetic probe
ttaactctctaactcaaatctccrcraaacataactaaaatacctaatac

SEQ ID NO: 4678 - DNA, 50 bp, Artificial Sequence
  Description of Artificial Sequence: Synthetic probe
aaatcccaaaaccccaaacataactctcaaaatctcaaaccccaaaaaca

SEQ ID NO: 4679 - DNA, 50 bp, Artificial Sequence
  Description of Artificial Sequence: Synthetic probe
ataaacaattcccaaactcaactaaccttaatatccttctaactccttac

SEQ ID NO: 4680 - DNA, 50 bp, Artificial Sequence
  Description of Artificial Sequence: Synthetic probe
aaataaaaacacaactaaaacatacatttctacttttatccraaataaac

SEQ ID NO: 4681 - DNA, 50 bp, Artificial Sequence
  Description of Artificial Sequence: Synthetic probe
atcttcaaaatatcracaacaaattatctccaaataaatcactaacaaac

SEQ ID NO: 4682 - DNA, 50 bp, Artificial Sequence
  Description of Artificial Sequence: Synthetic probe
ataacctactttctatctttcraataaataccttcttaatatacccatac

SEQ ID NO: 4683 - DNA, 50 bp, Artificial Sequence
  Description of Artificial Sequence: Synthetic probe
agtttttaggatatygatagtagattatttttaggtggattattggtaga

SEQ ID NO: 4684 - DNA, 50 bp, Artificial Sequence
  Description of Artificial Sequence: Synthetic probe
aaaccacttaaaccctaacrataaatattacaaaaaaatcctaacattac

SEQ ID NO: 4685 - DNA, 50 bp, Artificial Sequence
  Description of Artificial Sequence: Synthetic probe
aaatacaaatatacrtacraatccrcrtatctttatacaacratatcrac

SEQ ID NO: 4686 - DNA, 50 bp, Artificial Sequence
  Description of Artificial Sequence: Synthetic probe
tagttaggatagataaygtttatagtttaagtttataaaattgtygggtg

SEQ ID NO: 4687 - DNA, 50 bp, Artificial Sequence
  Description of Artificial Sequence: Synthetic probe
aatcaaaacaaataacrcccataattcaaattcacaaaactaccraatac

SEQ ID NO: 4688 - DNA, 50 bp, Artificial Sequence
  Description of Artificial Sequence: Synthetic probe
aataatatctcttaaatccaacacattccccaaaaacttactcatcttcc

SEQ ID NO: 4689 - DNA, 50 bp, Artificial Sequence
  Description of Artificial Sequence: Synthetic probe
aaatataaaaaaccctataataactcactctataaacacaaatttaaatc

SEQ ID NO: 4690 - DNA, 50 bp, Artificial Sequence
  Description of Artificial Sequence: Synthetic probe
aatttaaattatgggttgtttggaggaaggaagttaagtatttttttatt

SEQ ID NO: 4691 - DNA, 50 bp, Artificial Sequence
  Description of Artificial Sequence: Synthetic probe
caaaatatacaaacacaactacraactaaacraacccataaccctacaac

SEQ ID NO: 4692 - DNA, 50 bp, Artificial Sequence
  Description of Artificial Sequence: Synthetic probe
aaactcraaaaaaacractaaaacrctctatcractataaacrcrcctac

SEQ ID NO: 4693 - DNA, 50 bp, Artificial Sequence
  Description of Artificial Sequence: Synthetic probe
accctaaaaactaaaccctacaaacccrataacracttataaaactaccc

SEQ ID NO: 4694 - DNA, 50 bp, Artificial Sequence
  Description of Artificial Sequence: Synthetic probe
gtaatgttygtttttgttaygtttgtagaatygtaaaaagagtaagtgga

SEQ ID NO: 4695 - DNA, 50 bp, Artificial Sequence
  Description of Artificial Sequence: Synthetic probe
caaaaacctaaaaatccttcttaacttctctatattcctataaacracac

SEQ ID NO: 4696 - DNA, 50 bp, Artificial Sequence
  Description of Artificial Sequence: Synthetic probe
attacctaataaatatctcccattcaaaaaaacccaaatcrtataacrtc

SEQ ID NO: 4697 - DNA, 50 bp, Artificial Sequence
  Description of Artificial Sequence: Synthetic probe
ttactctataaaccatacttataattttaccaataatttctattatatac

SEQ ID NO: 4698 - DNA, 50 bp, Artificial Sequence
  Description of Artificial Sequence: Synthetic probe
gggtaagtttagatatatataatttggagtggattttttatgggaaaata

SEQ ID NO: 4699 - DNA, 50 bp, Artificial Sequence
  Description of Artificial Sequence: Synthetic probe
taaaattactactaacaacaaaccatatactacctaataaaaattcttcc

SEQ ID NO: 4700 - DNA, 50 bp, Artificial Sequence
  Description of Artificial Sequence: Synthetic probe
gggaagaattgagttatygttaggtatatagtggaatattgtgttaagtg

SEQ ID NO: 4701 - DNA, 50 bp, Artificial Sequence
  Description of Artificial Sequence: Synthetic probe
craaaacatcttcttcctcaacaaactactcaaaaacacctacaccracc

SEQ ID NO: 4702 - DNA, 50 bp, Artificial Sequence
  Description of Artificial Sequence: Synthetic probe
tttaaaaactaaaaaaccccaaaactaaaccataaataaatatcaaaccc

SEQ ID NO: 4703 - DNA, 50 bp, Artificial Sequence
  Description of Artificial Sequence: Synthetic probe
ctcaccracaataacattctctcataccaaaactaattaaccatccaacc

SEQ ID NO: 4704 - DNA, 50 bp, Artificial Sequence
  Description of Artificial Sequence: Synthetic probe
aaaaaaccctaaaacaatattaaaaaacctacctcctctcratcctctac

SEQ ID NO: 4705 - DNA, 50 bp, Artificial Sequence
  Description of Artificial Sequence: Synthetic probe
tattatccaaaaaattaacaacattaatattcrccattcccccacccatc

SEQ ID NO: 4706 - DNA, 50 bp, Artificial Sequence
  Description of Artificial Sequence: Synthetic probe
aaataataattcccaacctaaactccrtctaatataaaaatctcttacac

SEQ ID NO: 4707 - DNA, 50 bp, Artificial Sequence
  Description of Artificial Sequence: Synthetic probe
taaaaaaataaacttataacttacttacaattaaatcaaactctcttcac

SEQ ID NO: 4708 - DNA, 50 bp, Artificial Sequence
  Description of Artificial Sequence: Synthetic probe
ccaaccaatccaaaaattcctttctataaaaaaactataacaacaaaacc

SEQ ID NO: 4709 - DNA, 50 bp, Artificial Sequence
  Description of Artificial Sequence: Synthetic probe
aaactaaaaataactcrttcatcaaaatataaacaaccatcractaaaac

SEQ ID NO: 4710 - DNA, 50 bp, Artificial Sequence
  Description of Artificial Sequence: Synthetic probe
actaaataatcaattaactctaacataaaaaaatatcactaccrataaac

SEQ ID NO: 4711 - DNA, 50 bp, Artificial Sequence
  Description of Artificial Sequence: Synthetic probe
ttaaactcaaaactccaataatttaaacctcaacctcataaataaaatac

SEQ ID NO: 4712 - DNA, 50 bp, Artificial Sequence
  Description of Artificial Sequence: Synthetic probe
ratcaacraaacrttctcccacctataacractcaaattactaaaaaaac

SEQ ID NO: 4713 - DNA, 50 bp, Artificial Sequence
  Description of Artificial Sequence: Synthetic probe
aaaaatcacrcaacttccttcctttttctaaaaactataaaaacrcctcc

SEQ ID NO: 4714 - DNA, 50 bp, Artificial Sequence
  Description of Artificial Sequence: Synthetic probe
attcaacaaacccatacaatatactaccaaaactaaaaaaaacracaccc

SEQ ID NO: 4715 - DNA, 50 bp, Artificial Sequence
  Description of Artificial Sequence: Synthetic probe
aactctaaattacattccccrtatttcacaaaaacacaatcaaaacacac

SEQ ID NO: 4716 - DNA, 50 bp, Artificial Sequence
  Description of Artificial Sequence: Synthetic probe
aaataatcccttaacaactaaacacraaactactaacrtctaacrtaatc

SEQ ID NO: 4717 - DNA, 50 bp, Artificial Sequence
  Description of Artificial Sequence: Synthetic probe
tttagatagagatgaaggaaaagtttggttttgattttgaggattaaaag

SEQ ID NO: 4718 - DNA, 50 bp, Artificial Sequence
  Description of Artificial Sequence: Synthetic probe
ctcaactacctctatttctataacacctaccccaactaatccrctaaaac

SEQ ID NO: 4719 - DNA, 50 bp, Artificial Sequence
  Description of Artificial Sequence: Synthetic probe
atactatatatatcrcraaaaccctaaaaaaatccraaaactacaacttc

SEQ ID NO: 4720 - DNA, 50 bp, Artificial Sequence
  Description of Artificial Sequence: Synthetic probe
tactataatataaaattacactaaaatcatacccaatccaactcaccaac

SEQ ID NO: 4721 - DNA, 50 bp, Artificial Sequence
  Description of Artificial Sequence: Synthetic probe
aatataaaaaatacctctaccccaccaccccatctaaaatataaaaaaca

SEQ ID NO: 4722 - DNA, 50 bp, Artificial Sequence
  Description of Artificial Sequence: Synthetic probe
aataaacctcataaaccacaaatattccccaacactaacacttcaaaaac

SEQ ID NO: 4723 - DNA, 50 bp, Artificial Sequence
  Description of Artificial Sequence: Synthetic probe
aaactacccataaaaataaaattctaaaactcccctataaaaacaattcc

SEQ ID NO: 4724 - DNA, 50 bp, Artificial Sequence
  Description of Artificial Sequence: Synthetic probe
caacrtcaatttttttcaatcactatactacrccttaaaaataaaaacrc

SEQ ID NO: 4725 - DNA, 50 bp, Artificial Sequence
  Description of Artificial Sequence: Synthetic probe
ccctataaaacraatcrtacacrtcttatatctctacctctaccaaccac

SEQ ID NO: 4726 - DNA, 50 bp, Artificial Sequence
  Description of Artificial Sequence: Synthetic probe
gtagagttttggaaataggttttgggttaattgtaatagaatatattygt

SEQ ID NO: 4727 - DNA, 50 bp, Artificial Sequence
  Description of Artificial Sequence: Synthetic probe
aactaataaataactacacaaaattcactaaaacraaataccttccttac

SEQ ID NO: 4728 - DNA, 50 bp, Artificial Sequence
  Description of Artificial Sequence: Synthetic probe
taataacaatatatctctctattccaaatatctaaaaattcrctttcacc

SEQ ID NO: 4729 - DNA, 50 bp, Artificial Sequence
  Description of Artificial Sequence: Synthetic probe
aaattggtgagtgattgtatagagtttattgaaayggaatgttttttttg

SEQ ID NO: 4730 - DNA, 50 bp, Artificial Sequence
  Description of Artificial Sequence: Synthetic probe
tcctaaaaccacaacaactacctaacaacccraaaatacracaaataatc

SEQ ID NO: 4731 - DNA, 50 bp, Artificial Sequence
  Description of Artificial Sequence: Synthetic probe
aatataaccaaaacrcaataaaaaactctcrcrattaataaaaaacrttc

SEQ ID NO: 4732 - DNA, 50 bp, Artificial Sequence
  Description of Artificial Sequence: Synthetic probe
aataacrataaaaaattaaacrctcacrcraacrcctaaataaccaaaac

SEQ ID NO: 4733 - DNA, 50 bp, Artificial Sequence
  Description of Artificial Sequence: Synthetic probe
taaaaccaatcccaaactccacaaaatcaaatcacracttcacaccaatc

SEQ ID NO: 4734 - DNA, 50 bp, Artificial Sequence
  Description of Artificial Sequence: Synthetic probe
aaaatcaaaaacrccccrttccaaaacccttatcaccraaaaacaaaaac

SEQ ID NO: 4735 - DNA, 50 bp, Artificial Sequence
  Description of Artificial Sequence: Synthetic probe
caacracaacaaaacaaaatactaaacccaaaaccccacaaatcctcccc

SEQ ID NO: 4736 - DNA, 50 bp, Artificial Sequence
  Description of Artificial Sequence: Synthetic probe
ctacttcatacaatactaaactccacrtaaaaattcactaaataacaccc

SEQ ID NO: 4737 - DNA, 50 bp, Artificial Sequence
  Description of Artificial Sequence: Synthetic probe
taactccatttatttaaaacttaatcctaaaaaaccccaacccccataac

SEQ ID NO: 4738 - DNA, 50 bp, Artificial Sequence
  Description of Artificial Sequence: Synthetic probe
cacaattactaactactatacctaactacaactaaattctataacttcac

SEQ ID NO: 4739 - DNA, 50 bp, Artificial Sequence
  Description of Artificial Sequence: Synthetic probe
actaaatcccctttcttataatcacttcctataaatatataaaatctccc

SEQ ID NO: 4740 - DNA, 50 bp, Artificial Sequence
  Description of Artificial Sequence: Synthetic probe
tcaaaaaacattaaaacttaatttaatccaaccacrtctaaaccaaaaac

SEQ ID NO: 4741 - DNA, 50 bp, Artificial Sequence
  Description of Artificial Sequence: Synthetic probe
aaactaaaattaataacataatctcaactcattataatctccacctccca

SEQ ID NO: 4742 - DNA, 50 bp, Artificial Sequence
  Description of Artificial Sequence: Synthetic probe
tatagaagttattagtgagttatttattgttgagtaggtattggaaagat

SEQ ID NO: 4743 - DNA, 50 bp, Artificial Sequence
  Description of Artificial Sequence: Synthetic probe
acaaaaaccatcaataaatcacttattactaaacaaacattaaaaaaacc

SEQ ID NO: 4744 - DNA, 50 bp, Artificial Sequence
  Description of Artificial Sequence: Synthetic probe
caatcaaatcccaaaaacaataaatactaaaaacccractactaaacaac

SEQ ID NO: 4745 - DNA, 50 bp, Artificial Sequence
  Description of Artificial Sequence: Synthetic probe
ttaattaaattttagaaatagtgagtgttagaggttyggttgttaagtaa

SEQ ID NO: 4746 - DNA, 50 bp, Artificial Sequence
  Description of Artificial Sequence: Synthetic probe
aaaaaacraaaaacrcrtaaaaatacrctaactcatacccrcrtaatttc

SEQ ID NO: 4747 - DNA, 50 bp, Artificial Sequence
  Description of Artificial Sequence: Synthetic probe
cttaaccattaatctacactatcttttctacccataacccaatcaatctc

SEQ ID NO: 4748 - DNA, 50 bp, Artificial Sequence
  Description of Artificial Sequence: Synthetic probe
actaaacrttttacrtaaattaacttaattcaataattcaaaacacatac

SEQ ID NO: 4749 - DNA, 50 bp, Artificial Sequence
  Description of Artificial Sequence: Synthetic probe
ttacrtaaattaacttaattcaataattcaaaacacatacrattatcttc

SEQ ID NO: 4750 - DNA, 50 bp, Artificial Sequence
  Description of Artificial Sequence: Synthetic probe
ctcaactaaataactcataactttaaaacattaatcaaatcatataaacc

SEQ ID NO: 4751 - DNA, 50 bp, Artificial Sequence
  Description of Artificial Sequence: Synthetic probe
ataaacaacaataaccctataaatacrtaactcrctatcaccrtctaacc

SEQ ID NO: 4752 - DNA, 50 bp, Artificial Sequence
  Description of Artificial Sequence: Synthetic probe
craaaaacacaaccatctaacattatattatctatctaattattctcatc

SEQ ID NO: 4753 - DNA, 50 bp, Artificial Sequence
  Description of Artificial Sequence: Synthetic probe
tagtgggtaaatttattaaatttgtaatggaatataggagatgaataata

SEQ ID NO: 4754 - DNA, 50 bp, Artificial Sequence
  Description of Artificial Sequence: Synthetic probe
crataaaaacaatcaaataaacaacataatattaaataattatacttccc

SEQ ID NO: 4755 - DNA, 50 bp, Artificial Sequence
  Description of Artificial Sequence: Synthetic probe
aataaaataatatacrcaaaatcaaaattcaaacatacaaatcttcattc

SEQ ID NO: 4756 - DNA, 50 bp, Artificial Sequence
  Description of Artificial Sequence: Synthetic probe
acaatattatctttaaaactccataacttacaacatttaaacaaacatac

SEQ ID NO: 4757 - DNA, 50 bp, Artificial Sequence
  Description of Artificial Sequence: Synthetic probe
tttaaacaaacatacraataaaaatctacatatttaaactctaactttac

SEQ ID NO: 4758 - DNA, 50 bp, Artificial Sequence
  Description of Artificial Sequence: Synthetic probe
ctactttctaacctactttcccacattctttataaacctaattctctaac

SEQ ID NO: 4759 - DNA, 50 bp, Artificial Sequence
  Description of Artificial Sequence: Synthetic probe
tataaacctactacaaaaataaaaatcttcacccaaacccaaaactacac

SEQ ID NO: 4760 - DNA, 50 bp, Artificial Sequence
  Description of Artificial Sequence: Synthetic probe
tagtttataaggtgggaataataaaatttgtatataggaatttggggaaa

SEQ ID NO: 4761 - DNA, 50 bp, Artificial Sequence
  Description of Artificial Sequence: Synthetic probe
ataaaattaaaaaaactatatctaaaaccaatattctcaaatatatctcc

SEQ ID NO: 4762 - DNA, 50 bp, Artificial Sequence
  Description of Artificial Sequence: Synthetic probe
rtcctaaacaaaaaaatatatcacratacacaaacrctcaaacttacrac

SEQ ID NO: 4763 - DNA, 50 bp, Artificial Sequence
  Description of Artificial Sequence: Synthetic probe
taaacccrccaaaaatataaccrcaaaacrcctaacraataataattctc

SEQ ID NO: 4764 - DNA, 50 bp, Artificial Sequence
  Description of Artificial Sequence: Synthetic probe
aacccctataataaacaaaaaataaattctccacccatacaaccaaatac

SEQ ID NO: 4765 - DNA, 50 bp, Artificial Sequence
  Description of Artificial Sequence: Synthetic probe
taaccrccccttaaaaaatacaaacttcrtattctactacraaaccaaac

SEQ ID NO: 4766 - DNA, 50 bp, Artificial Sequence
  Description of Artificial Sequence: Synthetic probe
crcaataactataaatttatatatactttaccraaaaaaaccaaaactcc

SEQ ID NO: 4767 - DNA, 50 bp, Artificial Sequence
  Description of Artificial Sequence: Synthetic probe
caaatctaaaaatctcraaaacaaccctaatacccaattttctccatcac

SEQ ID NO: 4768 - DNA, 50 bp, Artificial Sequence
  Description of Artificial Sequence: Synthetic probe
aaaaactactaaattaaatcttataaaaacctttccaaccrtaacatccc

SEQ ID NO: 4769 - DNA, 50 bp, Artificial Sequence
  Description of Artificial Sequence: Synthetic probe
aacttttctttaataaaacctataaatccctaaaccrctctaccttctac

SEQ ID NO: 4770 - DNA, 50 bp, Artificial Sequence
  Description of Artificial Sequence: Synthetic probe
aaacctaaattctaaacactatatcccraaacccaactcctcaaaccaac

SEQ ID NO: 4771 - DNA, 50 bp, Artificial Sequence
  Description of Artificial Sequence: Synthetic probe
tttgagaattggaaggtttagtattgttatagaaaattttaggatatagg

SEQ ID NO: 4772 - DNA, 50 bp, Artificial Sequence
  Description of Artificial Sequence: Synthetic probe
ctaaaaactaaaaaacccaacactaccataaaaaacctcaaaatacaaac

SEQ ID NO: 4773 - DNA, 50 bp, Artificial Sequence
  Description of Artificial Sequence: Synthetic probe
aaaacaaacaaattatctctaataacctaatataactatcatattctatc

SEQ ID NO: 4774 - DNA, 50 bp, Artificial Sequence
  Description of Artificial Sequence: Synthetic probe
ttttttgaatgttttaaatatagttagaggataggtttgtagtgagatga

SEQ ID NO: 4775 - DNA, 50 bp, Artificial Sequence
  Description of Artificial Sequence: Synthetic probe
aataacctaataaaatccaaacttaaatctcraatctttacttaaacaac

SEQ ID NO: 4776 - DNA, 50 bp, Artificial Sequence
  Description of Artificial Sequence: Synthetic probe
ctttccattcctcactactaatccccaaaacataaaatatcataataccc

SEQ ID NO: 4777 - DNA, 50 bp, Artificial Sequence
  Description of Artificial Sequence: Synthetic probe
gggtgatttagtaaagtttaggtttgaatttygggtttttatttgggtaa

SEQ ID NO: 4778 - DNA, 50 bp, Artificial Sequence
  Description of Artificial Sequence: Synthetic probe
aataattccaacttcatacccatcatatatcctacattaaaacctaaccc

SEQ ID NO: 4779 - DNA, 50 bp, Artificial Sequence
  Description of Artificial Sequence: Synthetic probe
tctattatatttttaaattatctttatcttataaccctaaatttatatac

SEQ ID NO: 4780 - DNA, 50 bp, Artificial Sequence
  Description of Artificial Sequence: Synthetic probe
ctattatatttttaaattatctttatcttataaccctaaatttatataca

SEQ ID NO: 4781 - DNA, 50 bp, Artificial Sequence
  Description of Artificial Sequence: Synthetic probe
tgtaatatayggtaatatattgtgttttgtattgagatgttttggattyg

SEQ ID NO: 4782 - DNA, 50 bp, Artificial Sequence
  Description of Artificial Sequence: Synthetic probe
gtaatatatggtaatatattgtgttttgtattgagatgttttggatttgt

SEQ ID NO: 4783 - DNA, 50 bp, Artificial Sequence
  Description of Artificial Sequence: Synthetic probe
aaaygagaagttgtttaaaatattgagatgtttttttaggttggtaatag

SEQ ID NO: 4784 - DNA, 50 bp, Artificial Sequence
  Description of Artificial Sequence: Synthetic probe
aacraaaaactactcaaaacactaaaatacccctctaaactaataacaac

SEQ ID NO: 4785 - DNA, 50 bp, Artificial Sequence
  Description of Artificial Sequence: Synthetic probe
ttatttttyggtgagaaagttagaaaagttggaggatttattttaagtta

SEQ ID NO: 4786 - DNA, 50 bp, Artificial Sequence
  Description of Artificial Sequence: Synthetic probe
atttctcactcccattaaacrtcrcrtttctaaaaaaaccaatcaatatc

SEQ ID NO: 4787 - DNA, 50 bp, Artificial Sequence
  Description of Artificial Sequence: Synthetic probe
aatataaatcccrcraaatacrtaaaactttaaaacctaaaaactacrac

SEQ ID NO: 4788 - DNA, 50 bp, Artificial Sequence
  Description of Artificial Sequence: Synthetic probe
craatacttaccatcttcatctacaactattttcaaaatccttaaacttc

SEQ ID NO: 4789 - DNA, 50 bp, Artificial Sequence
  Description of Artificial Sequence: Synthetic probe
aaaaactcatccrtataccrtattcactacctaatatcttaatataaacc

SEQ ID NO: 4790 - DNA, 50 bp, Artificial Sequence
  Description of Artificial Sequence: Synthetic probe
cttatacaaaaaaactcctccttttccaaaaccatcaaataccttaaaac

SEQ ID NO: 4791 - DNA, 50 bp, Artificial Sequence
  Description of Artificial Sequence: Synthetic probe
acacataataaacatactctataaacatataaccattctaacctaaaaac

SEQ ID NO: 4792 - DNA, 50 bp, Artificial Sequence
  Description of Artificial Sequence: Synthetic probe
gatatatgataaatatgttttgtgagtatgtgattattttggtttggaaa

SEQ ID NO: 4793 - DNA, 50 bp, Artificial Sequence
  Description of Artificial Sequence: Synthetic probe
craatttacctacraaaattcccaaaaaaatctaaacaactaataacccc

SEQ ID NO: 4794 - DNA, 50 bp, Artificial Sequence
  Description of Artificial Sequence: Synthetic probe
aatctaacccrtcracaacraaaaatatcctaaataaatctataactacc

SEQ ID NO: 4795 - DNA, 50 bp, Artificial Sequence
  Description of Artificial Sequence: Synthetic probe
aaataaaccaataacccaaatcatccccaaatttctccrccaacaataac

SEQ ID NO: 4796 - DNA, 50 bp, Artificial Sequence
  Description of Artificial Sequence: Synthetic probe
ataacracccaaaaacaaaaattacaaataatcrcaattaccctaatccc

SEQ ID NO: 4797 - DNA, 50 bp, Artificial Sequence
  Description of Artificial Sequence: Synthetic probe
aaccaaatataaacacaaacctctaaaatttataaatataaaatacaacc

SEQ ID NO: 4798 - DNA, 50 bp, Artificial Sequence
  Description of Artificial Sequence: Synthetic probe
aaattaaaactaaaataaaccatatctctacccccrcctcctaaacaccc

SEQ ID NO: 4799 - DNA, 50 bp, Artificial Sequence
  Description of Artificial Sequence: Synthetic probe
acctctaaaatttataaatataaaatacaaccrtaataactaatcctaac

SEQ ID NO: 4800 - DNA, 50 bp, Artificial Sequence
  Description of Artificial Sequence: Synthetic probe
aaatataaaatacaaccrtaataactaatcctaacraatacttaaaaaac

SEQ ID NO: 4801 - DNA, 50 bp, Artificial Sequence
  Description of Artificial Sequence: Synthetic probe
ttacttaaacccaaaaaattaaaactaaaataaaccatatctctaccccc

SEQ ID NO: 4802 - DNA, 50 bp, Artificial Sequence
  Description of Artificial Sequence: Synthetic probe
tcaaacacataaacttatactatcacacaacaacatccrtaccaacaacc

SEQ ID NO: 4803 - DNA, 50 bp, Artificial Sequence
  Description of Artificial Sequence: Synthetic probe
actctacaatcatctaacaaaaatatttccaaaaaaacaaccrcaactcc

SEQ ID NO: 4804 - DNA, 50 bp, Artificial Sequence
  Description of Artificial Sequence: Synthetic probe
aactacacctaaaaaactcaaaactatcctaaatctacaacaaccaactc

SEQ ID NO: 4805 - DNA, 50 bp, Artificial Sequence
  Description of Artificial Sequence: Synthetic probe
aaatactaaaattataaacataaactaccacrtaaaccctttctcatccc

SEQ ID NO: 4806 - DNA, 50 bp, Artificial Sequence
  Description of Artificial Sequence: Synthetic probe
ctacaaactcaaaacaactttaaacctcccaaatacaaccaaaaaaaaac

SEQ ID NO: 4807 - DNA, 50 bp, Artificial Sequence
  Description of Artificial Sequence: Synthetic probe
aaaacaactttaaacctcccaaatacaaccaaaaaaaaacrccttcttac

SEQ ID NO: 4808 - DNA, 50 bp, Artificial Sequence
  Description of Artificial Sequence: Synthetic probe
acaaactcaataaaattactcaaacccaaaaactaactaaactctcaaac

SEQ ID NO: 4809 - DNA, 50 bp, Artificial Sequence
  Description of Artificial Sequence: Synthetic probe
rtcatcacccctaaatttactacaaacaaccataaaaacrtcccaaatcc

SEQ ID NO: 4810 - DNA, 50 bp, Artificial Sequence
  Description of Artificial Sequence: Synthetic probe
aaactcaattaattcctaaacttaaacaacctcactaaacctacaaatac

SEQ ID NO: 4811 - DNA, 50 bp, Artificial Sequence
  Description of Artificial Sequence: Synthetic probe
ygttattatttttgagtttgttgtaagtagttatggaaaygttttaagtt

SEQ ID NO: 4812 - DNA, 50 bp, Artificial Sequence
  Description of Artificial Sequence: Synthetic probe
attccatcaacrtcatcacccctaaatttactacaaacaaccataaaaac

SEQ ID NO: 4813 - DNA, 50 bp, Artificial Sequence
  Description of Artificial Sequence: Synthetic probe
attcctaaacttaaacaacctcactaaacctacaaatacraacttaaaac

SEQ ID NO: 4814 - DNA, 50 bp, Artificial Sequence
  Description of Artificial Sequence: Synthetic probe
raacttaaaacrtttccataactacttacaacaaactcaaaaataataac

SEQ ID NO: 4815 - DNA, 50 bp, Artificial Sequence
  Description of Artificial Sequence: Synthetic probe
aataccacatttcatatatattacttaatttacaattaaaattcccctcc

SEQ ID NO: 4816 - DNA, 50 bp, Artificial Sequence
  Description of Artificial Sequence: Synthetic probe
cctaaattccatctcaaaaccttactatcccaaaaatataaatttaaaac

SEQ ID NO: 4817 - DNA, 50 bp, Artificial Sequence
  Description of Artificial Sequence: Synthetic probe
acactacaaaacaaaacaaactttaaaattacataatttacacaaaccac

SEQ ID NO: 4818 - DNA, 50 bp, Artificial Sequence
  Description of Artificial Sequence: Synthetic probe
ttgtaaattaagtaatatatatgaaatgtggtattggygtttggggatag

SEQ ID NO: 4819 - DNA, 50 bp, Artificial Sequence
  Description of Artificial Sequence: Synthetic probe
tacaaaccaaataacatatataaaatataacattaacrcctaaaaacaac

SEQ ID NO: 4820 - DNA, 50 bp, Artificial Sequence
  Description of Artificial Sequence: Synthetic probe
tatattgtaaaatagggtaggttttgaagttgtataatttatataggtta

SEQ ID NO: 4821 - DNA, 50 bp, Artificial Sequence
  Description of Artificial Sequence: Synthetic probe
tcccrtaatctcaaaatctaaatacttaaaaaaaacttacctccrtaaac

SEQ ID NO: 4822 - DNA, 50 bp, Artificial Sequence
  Description of Artificial Sequence: Synthetic probe
aaatacttaaaaaaaacttacctccrtaaacrtttccttctctacaaaac

SEQ ID NO: 4823 - DNA, 50 bp, Artificial Sequence
  Description of Artificial Sequence: Synthetic probe
catctacccaaaaaaacraaaactacaacaaattctctctaacratacac

SEQ ID NO: 4824 - DNA, 50 bp, Artificial Sequence
  Description of Artificial Sequence: Synthetic probe
aaaaaataaataaaatacacaacccaataaattaacacaccraccatatc

SEQ ID NO: 4825 - DNA, 50 bp, Artificial Sequence
  Description of Artificial Sequence: Synthetic probe
cttttaaaataaaataatactctacaaccraacaataataacraccrccc

SEQ ID NO: 4826 - DNA, 50 bp, Artificial Sequence
  Description of Artificial Sequence: Synthetic probe
aataaataaaatacacaacccaataaattaacacaccraccatatcraac

SEQ ID NO: 4827 - DNA, 50 bp, Artificial Sequence
  Description of Artificial Sequence: Synthetic probe
tctccttttaaaataaaataatactctacaaccraacaataataacracc

SEQ ID NO: 4828 - DNA, 50 bp, Artificial Sequence
  Description of Artificial Sequence: Synthetic probe
aaataaataaagtgtataatttagtagattagtatatyggttatgtyggg

SEQ ID NO: 4829 - DNA, 50 bp, Artificial Sequence
  Description of Artificial Sequence: Synthetic probe
aaataaagtgtataatttagtagattagtatatyggttatgtygggyggt

SEQ ID NO: 4830 - DNA, 50 bp, Artificial Sequence
  Description of Artificial Sequence: Synthetic probe
aataaaatacacaacccaataaattaacacaccraccatatcraacracc

SEQ ID NO: 4831 - DNA, 50 bp, Artificial Sequence
  Description of Artificial Sequence: Synthetic probe
tacaatattcttttaatcctatttctcataaatattacccaaattaaaac

SEQ ID NO: 4832 - DNA, 50 bp, Artificial Sequence
  Description of Artificial Sequence: Synthetic probe
aatattcttttaatcctatttctcataaatattacccaaattaaaacrcc

SEQ ID NO: 4833 - DNA, 50 bp, Artificial Sequence
  Description of Artificial Sequence: Synthetic probe
aatcctatttctcataaatattacccaaattaaaacrccrctctacrccc

SEQ ID NO: 4834 - DNA, 50 bp, Artificial Sequence
  Description of Artificial Sequence: Synthetic probe
ctataaaatccrcrctaattaaatcccttccccaaatacracraaacaac

SEQ ID NO: 4835 - DNA, 50 bp, Artificial Sequence
  Description of Artificial Sequence: Synthetic probe
aaaatactacrctataaaatccrcrctaattaaatcccttccccaaatac

SEQ ID NO: 4836 - DNA, 50 bp, Artificial Sequence
  Description of Artificial Sequence: Synthetic probe
ccraaacrttaatacraaaaactaataaaatactacrctataaaatccrc

SEQ ID NO: 4837 - DNA, 50 bp, Artificial Sequence
  Description of Artificial Sequence: Synthetic probe
rtaaatacctaaatcrccctctactttttcctcaaaaaacrcrccraaac

SEQ ID NO: 4838 - DNA, 50 bp, Artificial Sequence
  Description of Artificial Sequence: Synthetic probe
aaaacracrtaaatacctaaatcrccctctactttttcctcaaaaaacrc

SEQ ID NO: 4839 - DNA, 50 bp, Artificial Sequence
  Description of Artificial Sequence: Synthetic probe
ctcaaaaaactataacraaaaccattaaccaaatacrccccrctccraac

SEQ ID NO: 4840 - DNA, 50 bp, Artificial Sequence
  Description of Artificial Sequence: Synthetic probe
ttagttagtttttaggaagttgtagygagagttattggttagataygttt

SEQ ID NO: 4841 - DNA, 50 bp, Artificial Sequence
  Description of Artificial Sequence: Synthetic probe
caaccaaccctcaaaaaactataacraaaaccattaaccaaatacrcccc

SEQ ID NO: 4842 - DNA, 50 bp, Artificial Sequence
  Description of Artificial Sequence: Synthetic probe
tacaacttcctaaaaactaactaattaactcccatatccrtccrtcaaac

SEQ ID NO: 4843 - DNA, 50 bp, Artificial Sequence
  Description of Artificial Sequence: Synthetic probe
acttcctaaaaactaactaattaactcccatatccrtccrtcaaacrcac

SEQ ID NO: 4844 - DNA, 50 bp, Artificial Sequence
  Description of Artificial Sequence: Synthetic probe
ctccaaatactaaaaattaactttaaaactataatttcataaccraacrc

SEQ ID NO: 4845 - DNA, 50 bp, Artificial Sequence
  Description of Artificial Sequence: Synthetic probe
aaaaccctccaaatactaaaaattaactttaaaactataatttcataacc

SEQ ID NO: 4846 - DNA, 50 bp, Artificial Sequence
  Description of Artificial Sequence: Synthetic probe
cacrtaaaaattcactaaataacacccrattctttttaaaataaaatctc

SEQ ID NO: 4847 - DNA, 50 bp, Artificial Sequence
  Description of Artificial Sequence: Synthetic probe
catatctccaccaacaacacacaactacttcatacaatactaaactccac

SEQ ID NO: 4848 - DNA, 50 bp, Artificial Sequence
  Description of Artificial Sequence: Synthetic probe
ctacaaaaatcacctaatcrccrcaaacrcttaaattcaacccaaacctc

SEQ ID NO: 4849 - DNA, 50 bp, Artificial Sequence
  Description of Artificial Sequence: Synthetic probe
aaatataaatacaacctaaccrctacaaaaatcacctaatcrccrcaaac

SEQ ID NO: 4850 - DNA, 50 bp, Artificial Sequence
  Description of Artificial Sequence: Synthetic probe
caaatcaaatataaatacaacctaaccrctacaaaaatcacctaatcrcc

SEQ ID NO: 4851 - DNA, 50 bp, Artificial Sequence
  Description of Artificial Sequence: Synthetic probe
atattaaattagatatgggtgtaatttggtygttgtaggggttatttagt

SEQ ID NO: 4852 - DNA, 50 bp, Artificial Sequence
  Description of Artificial Sequence: Synthetic probe
aaacactacccaaaccataacatcaaatcaaatataaatacaacctaacc

SEQ ID NO: 4853 - DNA, 50 bp, Artificial Sequence
  Description of Artificial Sequence: Synthetic probe
aacaatatttaacttatataacaatacaacttatccttttaaaaatcacc

SEQ ID NO: 4854 - DNA, 50 bp, Artificial Sequence
  Description of Artificial Sequence: Synthetic probe
acctctaatttcttataaaaatatcccattataaaaaaaacacacaactc

SEQ ID NO: 4855 - DNA, 50 bp, Artificial Sequence
  Description of Artificial Sequence: Synthetic probe
ggtttttgattttttgtgggggtgttttattgtgaagggaatatatagtt

SEQ ID NO: 4856 - DNA, 50 bp, Artificial Sequence
  Description of Artificial Sequence: Synthetic probe
aaactaattttaaaaccacrctacccaacctaataactcccaacaaaacc

SEQ ID NO: 4857 - DNA, 50 bp, Artificial Sequence
  Description of Artificial Sequence: Synthetic probe
ctccraaatccaaaaaatatcrataactaaaacacatctaaactaaaccc

SEQ ID NO: 4858 - DNA, 50 bp, Artificial Sequence
  Description of Artificial Sequence: Synthetic probe
taggttggttttagagttaygttgtttagtttggtagtttttagtagagt

SEQ ID NO: 4859 - DNA, 50 bp, Artificial Sequence
  Description of Artificial Sequence: Synthetic probe
ctaataactcccaacaaaaccraatccaacttaaatatactccaattatc

SEQ ID NO: 4860 - DNA, 50 bp, Artificial Sequence
  Description of Artificial Sequence: Synthetic probe
aaccraatccaacttaaatatactccaattatcratactccctaaatttc

SEQ ID NO: 4861 - DNA, 50 bp, Artificial Sequence
  Description of Artificial Sequence: Synthetic probe
aataccacctactactcactttttaactactctaaacaactaaaacaacc

SEQ ID NO: 4862 - DNA, 50 bp, Artificial Sequence
  Description of Artificial Sequence: Synthetic probe
ttgtygatgtgtataggttatattttttagattattygttgtaaggaagg

SEQ ID NO: 4863 - DNA, 50 bp, Artificial Sequence
  Description of Artificial Sequence: Synthetic probe
ctcactttttaactactctaaacaactaaaacaaccrccttccttacaac

SEQ ID NO: 4864 - DNA, 50 bp, Artificial Sequence
  Description of Artificial Sequence: Synthetic probe
gataggtygagttgttgtygatgtgtataggttatattttttagattatt

SEQ ID NO: 4865 - DNA, 50 bp, Artificial Sequence
  Description of Artificial Sequence: Synthetic probe
aataatctaaaaaatataacctatacacatcracaacaactcracctatc

SEQ ID NO: 4866 - DNA, 50 bp, Artificial Sequence
  Description of Artificial Sequence: Synthetic probe
aaaccrccaaaaacatctactacaataactcaaatattaccractctccc

SEQ ID NO: 4867 - DNA, 50 bp, Artificial Sequence
  Description of Artificial Sequence: Synthetic probe
aacacrcctaaaccrccaaaaacatctactacaataactcaaatattacc

SEQ ID NO: 4868 - DNA, 50 bp, Artificial Sequence
  Description of Artificial Sequence: Synthetic probe
aaaaatataacctatacacatcracaacaactcracctatcraaaaaacc

SEQ ID NO: 4869 - DNA, 50 bp, Artificial Sequence
  Description of Artificial Sequence: Synthetic probe
aggtaygtttgaatygttaaggatatttgttgtagtaatttaggtattgt

SEQ ID NO: 4870 - DNA, 50 bp, Artificial Sequence
  Description of Artificial Sequence: Synthetic probe
ctatcraaaaaaccracaatacctaaattactacaacaaatatccttaac

SEQ ID NO: 4871 - DNA, 50 bp, Artificial Sequence
  Description of Artificial Sequence: Synthetic probe
attactacaacaaatatccttaacrattcaaacrtaccttcctcacaaac

SEQ ID NO: 4872 - DNA, 50 bp, Artificial Sequence
  Description of Artificial Sequence: Synthetic probe
aaaacatattttaaaccccaatattcacaacacactatttttatcactcc

SEQ ID NO: 4873 - DNA, 50 bp, Artificial Sequence
  Description of Artificial Sequence: Synthetic probe
ttaaaacattttctattcaacatttttaacttcaaaacattttacttacc

SEQ ID NO: 4874 - DNA, 50 bp, Artificial Sequence
  Description of Artificial Sequence: Synthetic probe
tgtttaygagggtatatatgaagaaggtatttttattttagaaagtagtt

SEQ ID NO: 4875 - DNA, 50 bp, Artificial Sequence
  Description of Artificial Sequence: Synthetic probe
aaatttccaaaccctaaacttcaaaaatctactaaaaaacaacttctaac

SEQ ID NO: 4876 - DNA, 50 bp, Artificial Sequence
  Description of Artificial Sequence: Synthetic probe
aaaaaaaaatcaaaaaatcatcctctactcctaaaataacctaaaaaaac

SEQ ID NO: 4877 - DNA, 50 bp, Artificial Sequence
  Description of Artificial Sequence: Synthetic probe
atcaaaaaatcatcctctactcctaaaataacctaaaaaaacratataac

SEQ ID NO: 4878 - DNA, 50 bp, Artificial Sequence
  Description of Artificial Sequence: Synthetic probe
ttaacccraaaaatattcctctccccaaaccttcccaaataatactaccc

SEQ ID NO: 4879 - DNA, 50 bp, Artificial Sequence
  Description of Artificial Sequence: Synthetic probe
attctttcaaaatccccttccaaatacatccatcactaaaacaaacracc

SEQ ID NO: 4880 - DNA, 50 bp, Artificial Sequence
  Description of Artificial Sequence: Synthetic probe
tcrtattctttcaaaatccccttccaaatacatccatcactaaaacaaac

SEQ ID NO: 4881 - DNA, 50 bp, Artificial Sequence
  Description of Artificial Sequence: Synthetic probe
ccractactaaaacttctatcaccataccacacrcaaacatctttacctc

SEQ ID NO: 4882 - DNA, 50 bp, Artificial Sequence
  Description of Artificial Sequence: Synthetic probe
aaaaacrtaaacractcccractactaaaacttctatcaccataccacac

SEQ ID NO: 4883 - DNA, 50 bp, Artificial Sequence
  Description of Artificial Sequence: Synthetic probe
acraaataaaaatacctacrtataacataataacaaaaactccaacaatc

SEQ ID NO: 4884 - DNA, 50 bp, Artificial Sequence
  Description of Artificial Sequence: Synthetic probe
aaaacrtacaaaacaaaatcataactacttaaaaaacrtaaacractccc

SEQ ID NO: 4885 - DNA, 50 bp, Artificial Sequence
  Description of Artificial Sequence: Synthetic probe
acctacrtataacataataacaaaaactccaacaatcraaaatcrtccac

SEQ ID NO: 4886 - DNA, 50 bp, Artificial Sequence
  Description of Artificial Sequence: Synthetic probe
caatcraaaatcrtccacrctccccaaacaattataaccttatcctacac

SEQ ID NO: 4887 - DNA, 50 bp, Artificial Sequence
  Description of Artificial Sequence: Synthetic probe
aataatacaaaacacaaacctacaccataaaacttaaactatataacctc

SEQ ID NO: 4888 - DNA, 50 bp, Artificial Sequence
  Description of Artificial Sequence: Synthetic probe
ctatacctcaaatttcttatctatcrataaaaatacaaaatcccaccatc

SEQ ID NO: 4889 - DNA, 50 bp, Artificial Sequence
  Description of Artificial Sequence: Synthetic probe
acaacaaaaacccccaccaaacttaaaaactacaaatcctaatacacaac

SEQ ID NO: 4890 - DNA, 50 bp, Artificial Sequence
  Description of Artificial Sequence: Synthetic probe
aacrtaaaaatcacactaaaatccccaatacaaaaaaacrtacacractc

SEQ ID NO: 4891 - DNA, 50 bp, Artificial Sequence
  Description of Artificial Sequence: Synthetic probe
aacaataacccrcacttcacttaactataatttatccctatatactaaac

SEQ ID NO: 4892 - DNA, 50 bp, Artificial Sequence
  Description of Artificial Sequence: Synthetic probe
aaaataacrtaaaaatcacactaaaatccccaatacaaaaaaacrtacac

SEQ ID NO: 4893 - DNA, 50 bp, Artificial Sequence
  Description of Artificial Sequence: Synthetic probe
rcacttcacttaactataatttatccctatatactaaacraaccrtacac

SEQ ID NO: 4894 - DNA, 50 bp, Artificial Sequence
  Description of Artificial Sequence: Synthetic probe
acctaaaaaataacrtaaaaatcacactaaaatccccaatacaaaaaaac

SEQ ID NO: 4895 - DNA, 50 bp, Artificial Sequence
  Description of Artificial Sequence: Synthetic probe
aaaaaaactacataacttaacraactataataacctcracraactctctc

SEQ ID NO: 4896 - DNA, 50 bp, Artificial Sequence
  Description of Artificial Sequence: Synthetic probe
ttttttaggtatttggaaattttatttgtagtgtagaggttaggaggtgt

SEQ ID NO: 4897 - DNA, 50 bp, Artificial Sequence
  Description of Artificial Sequence: Synthetic probe
ctcaacacactatcctcaaaattcatccctaaaatatatatatccraatc

SEQ ID NO: 4898 - DNA, 50 bp, Artificial Sequence
  Description of Artificial Sequence: Synthetic probe
aaactaaattaaataacatcaaaatactacctcattccaatatataactc

SEQ ID NO: 4899 - DNA, 50 bp, Artificial Sequence
  Description of Artificial Sequence: Synthetic probe
actatttactcaaaatcctaactttctacacttaaaaaaacttcctaccc

SEQ ID NO: 4900 - DNA, 50 bp, Artificial Sequence
  Description of Artificial Sequence: Synthetic probe
cccraaccaaaactaaaatctcctactcaaccraaccctaaaatattacc

SEQ ID NO: 4901 - DNA, 50 bp, Artificial Sequence
  Description of Artificial Sequence: Synthetic probe
taaaccaaaaacctaaaaatccttcttaacttctctatattcctataaac

SEQ ID NO: 4902 - DNA, 50 bp, Artificial Sequence
  Description of Artificial Sequence: Synthetic probe
caaaatatatctaaaaaaccacrtaaacctaccracaaactaaacrtacc

SEQ ID NO: 4903 - DNA, 50 bp, Artificial Sequence
  Description of Artificial Sequence: Synthetic probe
aatccttcttaacttctctatattcctataaacracacrttcaatctacc

SEQ ID NO: 4904 - DNA, 50 bp, Artificial Sequence
  Description of Artificial Sequence: Synthetic probe
aaaaaaaaaaccraattcaaaatatatctaaaaaaccacrtaaacctacc

SEQ ID NO: 4905 - DNA, 50 bp, Artificial Sequence
  Description of Artificial Sequence: Synthetic probe
acttctctatattcctataaacracacrttcaatctaccracaaatccac

SEQ ID NO: 4906 - DNA, 50 bp, Artificial Sequence
  Description of Artificial Sequence: Synthetic probe
tataaaaaatacaactaccaaacaatcctaaaaaaattcaaccacatccc

SEQ ID NO: 4907 - DNA, 50 bp, Artificial Sequence
  Description of Artificial Sequence: Synthetic probe
aactaaattctacatcctacattcttaattcttcctaacctaaatataac

SEQ ID NO: 4908 - DNA, 50 bp, Artificial Sequence
  Description of Artificial Sequence: Synthetic probe
tcctacattcttaattcttcctaacctaaatataacraaaaactaacacc

SEQ ID NO: 4909 - DNA, 50 bp, Artificial Sequence
  Description of Artificial Sequence: Synthetic probe
aaaaaaacaaaacctctacccaactcctaaataactcaatatataaaaac

SEQ ID NO: 4910 - DNA, 50 bp, Artificial Sequence
  Description of Artificial Sequence: Synthetic probe
aaacaaacraaaaccaataacacacaaaaaaatcactcaaacacctacac

SEQ ID NO: 4911 - DNA, 50 bp, Artificial Sequence
  Description of Artificial Sequence: Synthetic probe
ataaaaacrtataaatacctaaataaccttcctatatatcactaaccctc

SEQ ID NO: 4912 - DNA, 50 bp, Artificial Sequence
  Description of Artificial Sequence: Synthetic probe
aatacctaaataaccttcctatatatcactaaccctcrcctatcttcctc

SEQ ID NO: 4913 - DNA, 50 bp, Artificial Sequence
  Description of Artificial Sequence: Synthetic probe
aaaactaaatctaactacacaacacacrcatctaaaaaaaccraaactac

SEQ ID NO: 4914 - DNA, 50 bp, Artificial Sequence
  Description of Artificial Sequence: Synthetic probe
aaataccaaaaactaaatctaactacacaacacacrcatctaaaaaaacc

SEQ ID NO: 4915 - DNA, 50 bp, Artificial Sequence
  Description of Artificial Sequence: Synthetic probe
aaacccaccaaaccaaaataccaaaaactaaatctaactacacaacacac

SEQ ID NO: 4916 - DNA, 50 bp, Artificial Sequence
  Description of Artificial Sequence: Synthetic probe
cctcaaacctttactaacttcctaatactaaaaacaaaaaccaactaccc

SEQ ID NO: 4917 - DNA, 50 bp, Artificial Sequence
  Description of Artificial Sequence: Synthetic probe
taacttcctaatactaaaaacaaaaaccaactacccrcatactatctccc

SEQ ID NO: 4918 - DNA, 50 bp, Artificial Sequence
  Description of Artificial Sequence: Synthetic probe
cacctacaataaaaataaaactaaaactaacaaaactcaacctaaaccrc

SEQ ID NO: 4919 - DNA, 50 bp, Artificial Sequence
  Description of Artificial Sequence: Synthetic probe
taaaactaacaaaactcaacctaaaccrcrttaaacttaatcatcaaatc

SEQ ID NO: 4920 - DNA, 50 bp, Artificial Sequence
  Description of Artificial Sequence: Synthetic probe
ygggtttttgttatatatattagtttttaatygagaaagtaggttaygtt

SEQ ID NO: 4921 - DNA, 50 bp, Artificial Sequence
  Description of Artificial Sequence: Synthetic probe
cctaaaccrcrttaaacttaatcatcaaatcraacrtaacctactttctc

SEQ ID NO: 4922 - DNA, 50 bp, Artificial Sequence
  Description of Artificial Sequence: Synthetic probe
crctaacrcaaaacaaaaactatacacttaactatttcaaaaaacaaatc

SEQ ID NO: 4923 - DNA, 50 bp, Artificial Sequence
  Description of Artificial Sequence: Synthetic probe
ctctaccataaaaatctctatataaataccttaccaccaccaaactcccc

SEQ ID NO: 4924 - DNA, 50 bp, Artificial Sequence
  Description of Artificial Sequence: Synthetic probe
acaaaacratataacrctaacttaatatccrcatactaatcctaaaaacc

SEQ ID NO: 4925 - DNA, 50 bp, Artificial Sequence
  Description of Artificial Sequence: Synthetic probe
taaaaaccctaaaaactatctacaaaaaacracccccaaaaccaacatac

SEQ ID NO: 4926 - DNA, 50 bp, Artificial Sequence
  Description of Artificial Sequence: Synthetic probe
ccacaacttcacccraaaacacaaaacratataacrctaacttaatatcc

SEQ ID NO: 4927 - DNA, 50 bp, Artificial Sequence
  Description of Artificial Sequence: Synthetic probe
aaacrtcaataaaactcrcrtaaaacatttaaacaaccacaacttcaccc

SEQ ID NO: 4928 - DNA, 50 bp, Artificial Sequence
  Description of Artificial Sequence: Synthetic probe
ttaggattagtatgyggatattaagttagygttatatygttttgtgtttt

SEQ ID NO: 4929 - DNA, 50 bp, Artificial Sequence
  Description of Artificial Sequence: Synthetic probe
tacatcrccttatatccccraataaaactataactacccaaatatcccac

SEQ ID NO: 4930 - DNA, 50 bp, Artificial Sequence
  Description of Artificial Sequence: Synthetic probe
ccccraataaaactataactacccaaatatcccacrcraattctactaac

SEQ ID NO: 4931 - DNA, 50 bp, Artificial Sequence
  Description of Artificial Sequence: Synthetic probe
acattcratcaacataaacraacaacraccttcrtaacaactctaacaac

SEQ ID NO: 4932 - DNA, 50 bp, Artificial Sequence
  Description of Artificial Sequence: Synthetic probe
aaacctttacacrcraaacattcratcaacataaacraacaacraccttc

SEQ ID NO: 4933 - DNA, 50 bp, Artificial Sequence
  Description of Artificial Sequence: Synthetic probe
raattctactaacrcttcctcctttcrttactaaaactaccacraaaacc

SEQ ID NO: 4934 - DNA, 50 bp, Artificial Sequence
  Description of Artificial Sequence: Synthetic probe
caccaaaacraaccaaacctttacacrcraaacattcratcaacataaac

SEQ ID NO: 4935 - DNA, 50 bp, Artificial Sequence
  Description of Artificial Sequence: Synthetic probe
crtactccaaataacrctccttttcaccaaaacraaccaaacctttacac

SEQ ID NO: 4936 - DNA, 50 bp, Artificial Sequence
  Description of Artificial Sequence: Synthetic probe
taaccctaacctatctcctcaactcaactaaaacccacrtcttaataacc

SEQ ID NO: 4937 - DNA, 50 bp, Artificial Sequence
  Description of Artificial Sequence: Synthetic probe
ctctacctacraacacaaaacaaaaaaactactaactccatccaccattc

SEQ ID NO: 4938 - DNA, 50 bp, Artificial Sequence
  Description of Artificial Sequence: Synthetic probe
aataaaaaccraataataaataaaaccaacaacctccctaccctatatcc

SEQ ID NO: 4939 - DNA, 50 bp, Artificial Sequence
  Description of Artificial Sequence: Synthetic probe
aaaaaactttacctccaacaccraactcaataacataaccaaatactccc

SEQ ID NO: 4940 - DNA, 50 bp, Artificial Sequence
  Description of Artificial Sequence: Synthetic probe
tactaaactcratactaaaaacaaaacccctcttaaaaaaccaaaaccac

SEQ ID NO: 4941 - DNA, 50 bp, Artificial Sequence
  Description of Artificial Sequence: Synthetic probe
ctaaactcratactaaaaacaaaacccctcttaaaaaaccaaaaccacrc

SEQ ID NO: 4942 - DNA, 50 bp, Artificial Sequence
  Description of Artificial Sequence: Synthetic probe
aaaacrcaaacaatattctcaaaaataaccrtcttcttctccaaactctc

SEQ ID NO: 4943 - DNA, 50 bp, Artificial Sequence
  Description of Artificial Sequence: Synthetic probe
ccctcttaaaaaaccaaaaccacrcraaatcaaaactcctacaaaaatac

SEQ ID NO: 4944 - DNA, 50 bp, Artificial Sequence
  Description of Artificial Sequence: Synthetic probe
ccctctccacctcccrattcaaaacrcaaacaatattctcaaaaataacc

SEQ ID NO: 4945 - DNA, 50 bp, Artificial Sequence
  Description of Artificial Sequence: Synthetic probe
aaaacttcaatcttatcttaatccaaccratactaccractacaaacctc

SEQ ID NO: 4946 - DNA, 50 bp, Artificial Sequence
  Description of Artificial Sequence: Synthetic probe
aaccttactactcaaaacttcaatcttatcttaatccaaccratactacc

SEQ ID NO: 4947 - DNA, 50 bp, Artificial Sequence
  Description of Artificial Sequence: Synthetic probe
actaaaccaaaacaaaattaaaaccctaaataacaaaatttatacctacc

SEQ ID NO: 4948 - DNA, 50 bp, Artificial Sequence
  Description of Artificial Sequence: Synthetic probe
ggttggattaagataagattgaagttttgagtagtaaggtttgtgtttgt

SEQ ID NO: 4949 - DNA, 50 bp, Artificial Sequence
  Description of Artificial Sequence: Synthetic probe
cattatccraactctaaaactccaaaacctactaaaacctactaaaacac

SEQ ID NO: 4950 - DNA, 50 bp, Artificial Sequence
  Description of Artificial Sequence: Synthetic probe
cccctaaaccacactaaactaaaatttacaaataaaattctacattatcc

SEQ ID NO: 4951 - DNA, 50 bp, Artificial Sequence
  Description of Artificial Sequence: Synthetic probe
taatattcrtaccccaacaaattctaacaaatcctaaaactttaaaaccc

SEQ ID NO: 4952 - DNA, 50 bp, Artificial Sequence
  Description of Artificial Sequence: Synthetic probe
ttttttaaattatattggattggggtttgtagatggagttttatattgtt

SEQ ID NO: 4953 - DNA, 50 bp, Artificial Sequence
  Description of Artificial Sequence: Synthetic probe
aaatcaaccataaataaaaatatacataacctaatataacttctaaacac

SEQ ID NO: 4954 - DNA, 50 bp, Artificial Sequence
  Description of Artificial Sequence: Synthetic probe
aataaaaatatacataacctaatataacttctaaacacrcttactaaccc

SEQ ID NO: 4955 - DNA, 50 bp, Artificial Sequence
  Description of Artificial Sequence: Synthetic probe
taattttattttygttaagaggtggtggttttaagtttatatagaagttt

SEQ ID NO: 4956 - DNA, 50 bp, Artificial Sequence
  Description of Artificial Sequence: Synthetic probe
rcttactaacccraaacttctatataaacttaaaaccaccacctcttaac

SEQ ID NO: 4957 - DNA, 50 bp, Artificial Sequence
  Description of Artificial Sequence: Synthetic probe
aaaaaacataaaacccaaaaatacccaaaaacactatcctactaaaaatc

SEQ ID NO: 4958 - DNA, 50 bp, Artificial Sequence
  Description of Artificial Sequence: Synthetic probe
cctaccraataccaaaaccaccttccctcttacaaaaaaaatacraacac

SEQ ID NO: 4959 - DNA, 50 bp, Artificial Sequence
  Description of Artificial Sequence: Synthetic probe
actacacctaccraataccaaaaccaccttccctcttacaaaaaaaatac

SEQ ID NO: 4960 - DNA, 50 bp, Artificial Sequence
  Description of Artificial Sequence: Synthetic probe
crtaaataaatacctccatctccaaaaccttctactccaaatcaaccatc

SEQ ID NO: 4961 - DNA, 50 bp, Artificial Sequence
  Description of Artificial Sequence: Synthetic probe
aaacraaaacaacaataaacraaatatctccaaacatccccctcattacc

SEQ ID NO: 4962 - DNA, 50 bp, Artificial Sequence
  Description of Artificial Sequence: Synthetic probe
aaaaaaataattaaaccatcaaactataataaaaactttatcactctttc

SEQ ID NO: 4963 - DNA, 50 bp, Artificial Sequence
  Description of Artificial Sequence: Synthetic probe
tcttctacaaaatcaacccttaaaaaaatcaaaacaacataaccctttac

SEQ ID NO: 4964 - DNA, 50 bp, Artificial Sequence
  Description of Artificial Sequence: Synthetic probe
acccaaaaaacaaaacttacaataaaccaaaattacaccactacaatcca

SEQ ID NO: 4965 - DNA, 50 bp, Artificial Sequence
  Description of Artificial Sequence: Synthetic probe
cccaacaaaaaatccttaaaaattccraaatttttcactctacrtaaaac

SEQ ID NO: 4966 - DNA, 50 bp, Artificial Sequence
  Description of Artificial Sequence: Synthetic probe
atgtgaatagggaagggatttgtgtggagtagaattttagaattttatat

SEQ ID NO: 4967 - DNA, 50 bp, Artificial Sequence
  Description of Artificial Sequence: Synthetic probe
ctaacrtatataaaacaaatctaccccraaacaaataacraaacaacccc

SEQ ID NO: 4968 - DNA, 50 bp, Artificial Sequence
  Description of Artificial Sequence: Synthetic probe
taactatccctatacrtccaaaaattacccacatccttcccactataaac

SEQ ID NO: 4969 - DNA, 50 bp, Artificial Sequence
  Description of Artificial Sequence: Synthetic probe
ttatgtatgagagattgagataagaggtaagttagtgtaaaagtggtttt

SEQ ID NO: 4970 - DNA, 50 bp, Artificial Sequence
  Description of Artificial Sequence: Synthetic probe
ctacctaaccracacraaaacaatctctttaaaacctctcraaaaactcc

SEQ ID NO: 4971 - DNA, 50 bp, Artificial Sequence
  Description of Artificial Sequence: Synthetic probe
actcctaatacttttccatccataaaaacccraactcaaactcataaatc

SEQ ID NO: 4972 - DNA, 50 bp, Artificial Sequence
  Description of Artificial Sequence: Synthetic probe
aaaactcaaaaaaaataacrccctctcttcaacttatctttctaaataac

SEQ ID NO: 4973 - DNA, 50 bp, Artificial Sequence
  Description of Artificial Sequence: Synthetic probe
cacaacctcatcactaacctcatcactaaccaatcaccaattaaaaaccc

SEQ ID NO: 4974 - DNA, 50 bp, Artificial Sequence
  Description of Artificial Sequence: Synthetic probe
crtaaattcccaaaaaaaaaatccccaaataccccrcaaaaaaaactatc

SEQ ID NO: 4975 - DNA, 50 bp, Artificial Sequence
  Description of Artificial Sequence: Synthetic probe
aaaaactaaaaaatccaccaaacccraccctaaaacrtaaccctaaaacc

SEQ ID NO: 4976 - DNA, 50 bp, Artificial Sequence
  Description of Artificial Sequence: Synthetic probe
aaccatacatctaacrctacraacaaacrctaatactcctaaactactac

SEQ ID NO: 4977 - DNA, 50 bp, Artificial Sequence
  Description of Artificial Sequence: Synthetic probe
gtatatgtaatagttggggtatagtaggagttttattttgaagtagtgta

SEQ ID NO: 4978 - DNA, 50 bp, Artificial Sequence
  Description of Artificial Sequence: Synthetic probe
tccaaaatcaactttctaattccacatcaactatacaaacaataatatcc

SEQ ID NO: 4979 - DNA, 50 bp, Artificial Sequence
  Description of Artificial Sequence: Synthetic probe
aaacctactataaaaaacaccrtactccctcraaacctactctaaattcc

SEQ ID NO: 4980 - DNA, 50 bp, Artificial Sequence
  Description of Artificial Sequence: Synthetic probe
aaaaacaacaaaactaaactcatctccataacccaaactttactttcctc

SEQ ID NO: 4981 - DNA, 50 bp, Artificial Sequence
  Description of Artificial Sequence: Synthetic probe
aaatccctacaaaccaacaacraactatattaacracratatctaaaatc

SEQ ID NO: 4982 - DNA, 50 bp, Artificial Sequence
  Description of Artificial Sequence: Synthetic probe
atataaaaaaaccttaccatcraacttcctatctctcttcatttaaacac

SEQ ID NO: 4983 - DNA, 50 bp, Artificial Sequence
  Description of Artificial Sequence: Synthetic probe
ttttttatggtgaatgttatttgtagygaggttttagagggtaatattat

SEQ ID NO: 4984 - DNA, 50 bp, Artificial Sequence
  Description of Artificial Sequence: Synthetic probe
cccccataataaatatcacctacaacraaatctcaaaaaacaacatcacc

SEQ ID NO: 4985 - DNA, 50 bp, Artificial Sequence
  Description of Artificial Sequence: Synthetic probe
ccccataataaatatcacctacaacaaaatctcaaaaaacaacatcacca

SEQ ID NO: 4986 - DNA, 50 bp, Artificial Sequence
  Description of Artificial Sequence: Synthetic probe
aaaaataactcctataacttaaaactataataaaaaacccataaacaaac

SEQ ID NO: 4987 - DNA, 50 bp, Artificial Sequence
  Description of Artificial Sequence: Synthetic probe
atatacaaacctaatatcaacctcactccctaactcttctatccacaaac

SEQ ID NO: 4988 - DNA, 50 bp, Artificial Sequence
  Description of Artificial Sequence: Synthetic probe
aacaaatactaaccctttttctctttcccaaacccccactttaaaaaacc

SEQ ID NO: 4989 - DNA, 50 bp, Artificial Sequence
  Description of Artificial Sequence: Synthetic probe
aaaataacctaattaaacaaacaaccraaatactttataaattaatccac

SEQ ID NO: 4990 - DNA, 50 bp, Artificial Sequence
  Description of Artificial Sequence: Synthetic probe
aaaaacctcaccatctaaacrataccacrattaataaaaatataacraac

SEQ ID NO: 4991 - DNA, 50 bp, Artificial Sequence
  Description of Artificial Sequence: Synthetic probe
ctaaaattttctataacaatactaaaccttccaattctcaaataaacccc

SEQ ID NO: 4992 - DNA, 50 bp, Artificial Sequence
  Description of Artificial Sequence: Synthetic probe
attaggtagaaaaaaattattatttattgaaggggttatgtaatgggaag

SEQ ID NO: 4993 - DNA, 50 bp, Artificial Sequence
  Description of Artificial Sequence: Synthetic probe
aaaaataaaaaattctcaatactaaacctcccaaccccaaacaccrcctc

SEQ ID NO: 4994 - DNA, 50 bp, Artificial Sequence
  Description of Artificial Sequence: Synthetic probe
tcaccacaaaaattcctaaaatcacaatattttccaaatttcctataaca

SEQ ID NO: 4995 - DNA, 50 bp, Artificial Sequence
  Description of Artificial Sequence: Synthetic probe
aaaaaaaatattatccacaaaacaaataaaaatattaaactaacccaaca

SEQ ID NO: 4996 - DNA, 50 bp, Artificial Sequence
  Description of Artificial Sequence: Synthetic probe
tataataaaacaaaacctaaacataaaaaaacttaccccctaatacccac

SEQ ID NO: 4997 - DNA, 50 bp, Artificial Sequence
  Description of Artificial Sequence: Synthetic probe
aaaaaaaaacaaataaaaaactactaatcaccacctatcacaaaacccac

SEQ ID NO: 4998 - DNA, 50 bp, Artificial Sequence
  Description of Artificial Sequence: Synthetic probe
aaaacatattctaatttctatctataactcrtttctaattctaccaccrc

SEQ ID NO: 4999 - DNA, 50 bp, Artificial Sequence
  Description of Artificial Sequence: Synthetic probe
cttctcctccaaaatatccttctaactattccaatactccrcaacaaacc

SEQ ID NO: 5000 - DNA, 50 bp, Artificial Sequence
  Description of Artificial Sequence: Synthetic probe
tacaaaaacrcactaaatattactatatatcrcraatcrtctaaataaac

SEQ ID NO: 5001 - DNA, 50 bp, Artificial Sequence
  Description of Artificial Sequence: Synthetic probe
attttcctaaaataaataaaaaactccttcatctttctctacccccaaac

SEQ ID NO: 5002 - DNA, 50 bp, Artificial Sequence
  Description of Artificial Sequence: Synthetic probe
aaaaaaacaaatcacaaaatcaaaaaatcaaaaccatcctaactaacaca

SEQ ID NO: 5003 - DNA, 50 bp, Artificial Sequence
  Description of Artificial Sequence: Synthetic probe
tctatcatccccaacctaactacctctacataatataaaacactcaaccc

SEQ ID NO: 5004 - DNA, 50 bp, Artificial Sequence
  Description of Artificial Sequence: Synthetic probe
craaacaaaaactataaataaaaaacccctataaatcctcrctcracttc

SEQ ID NO: 5005 - DNA, 50 bp, Artificial Sequence
  Description of Artificial Sequence: Synthetic probe
ttataataactccacaattaataccacaacccatataaccaatcaatccc

SEQ ID NO: 5006 - DNA, 50 bp, Artificial Sequence
  Description of Artificial Sequence: Synthetic probe
aaaacccaacaaaataaaacttttatatattacttaatccaacctcccrc

SEQ ID NO: 5007 - DNA, 50 bp, Artificial Sequence
  Description of Artificial Sequence: Synthetic probe
cctaaactaaaacaaacracccttatctctttcccaaccttacttacccc

SEQ ID NO: 5008 - DNA, 50 bp, Artificial Sequence
  Description of Artificial Sequence: Synthetic probe
ctttaactttccctaccccttacttaaaccaaactactatccaaactccc

SEQ ID NO: 5009 - DNA, 50 bp, Artificial Sequence
  Description of Artificial Sequence: Synthetic probe
caaccctaaaaaaatttcccttttaaaatcttacratattaaataaaacc

SEQ ID NO: 5010 - DNA, 50 bp, Artificial Sequence
  Description of Artificial Sequence: Synthetic probe
ccraatccrcraataacaccaaactactacactaaaaaaatcaccctacc

SEQ ID NO: 5011 - DNA, 50 bp, Artificial Sequence
  Description of Artificial Sequence: Synthetic probe
taccacaaaactactacraacaataccrctacataactaacaacraaaac

SEQ ID NO: 5012 - DNA, 50 bp, Artificial Sequence
  Description of Artificial Sequence: Synthetic probe
aaacaaaatttcaccatattaaccaaaataatttcaatctcctaacctca

SEQ ID NO: 5013 - DNA, 50 bp, Artificial Sequence
  Description of Artificial Sequence: Synthetic probe
craatttaaaaattaaaacctccractacaaatccrcctaaaccaaacrc

SEQ ID NO: 5014 - DNA, 50 bp, Artificial Sequence
  Description of Artificial Sequence: Synthetic probe
taaaaaacatctttatcaatcaactcttcatattaaaatattaccaaacc

SEQ ID NO: 5015 - DNA, 50 bp, Artificial Sequence
  Description of Artificial Sequence: Synthetic probe
ccraaaacraaaaccrcrccraaactcrtatcaataaaaactaaaatatc

SEQ ID NO: 5016 - DNA, 50 bp, Artificial Sequence
  Description of Artificial Sequence: Synthetic probe
ctctaaaactataatccctaaaaaccractaatcaactataaaaaatatc

SEQ ID NO: 5017 - DNA, 50 bp, Artificial Sequence
  Description of Artificial Sequence: Synthetic probe
taaacataattttacraactcrataaaccttaaactatccctctaaactc

SEQ ID NO: 5018 - DNA, 50 bp, Artificial Sequence
  Description of Artificial Sequence: Synthetic probe
atacrataaaaacrcracaaaaaaaataacccaatcttcraacrtccaac

SEQ ID NO: 5019 - DNA, 50 bp, Artificial Sequence
  Description of Artificial Sequence: Synthetic probe
aaaaaaatatatcacratacacaaacrctcaaacttacracrctactacc

SEQ ID NO: 5020 - DNA, 50 bp, Artificial Sequence
  Description of Artificial Sequence: Synthetic probe
raaaatatatataaaacaaaatataatttaaattctataatcctcacccc

SEQ ID NO: 5021 - DNA, 50 bp, Artificial Sequence
  Description of Artificial Sequence: Synthetic probe
tttygtaaataaggattttaggtgatttgtaagtgygttttttgttggtt

SEQ ID NO: 5022 - DNA, 50 bp, Artificial Sequence
  Description of Artificial Sequence: Synthetic probe
cccrtaaataaaaacttcaaataacctacaaatacrccccctactaaccc

SEQ ID NO: 5023 - DNA, 50 bp, Artificial Sequence
  Description of Artificial Sequence: Synthetic probe
attcttcttataacattaatacaaccttctataaaaatatcttttccaac

SEQ ID NO: 5024 - DNA, 50 bp, Artificial Sequence
  Description of Artificial Sequence: Synthetic probe
raaatttccaaactaaaacaatcraacracrataacaaaacrataacccc

SEQ ID NO: 5025 - DNA, 50 bp, Artificial Sequence
  Description of Artificial Sequence: Synthetic probe
ttaaataaataaaccataatttatttaaacaatcccttactaaaaaacac

SEQ ID NO: 5026 - DNA, 50 bp, Artificial Sequence
  Description of Artificial Sequence: Synthetic probe
aaatcaataaataaatatcaaacactcacaacaacaaattaaaaacccac

SEQ ID NO: 5027 - DNA, 50 bp, Artificial Sequence
  Description of Artificial Sequence: Synthetic probe
gttgggtagatgaattataatttgtttaagtagttttttgttaagggata

SEQ ID NO: 5028 - DNA, 50 bp, Artificial Sequence
  Description of Artificial Sequence: Synthetic probe
caattaaaaaaattctcaaaaataccatactcataaaaactccaaaacac

SEQ ID NO: 5029 - DNA, 50 bp, Artificial Sequence
  Description of Artificial Sequence: Synthetic probe
aataccatactatcttaataactataacaaaaaacrtaaactttttcccc

SEQ ID NO: 5030 - DNA, 50 bp, Artificial Sequence
  Description of Artificial Sequence: Synthetic probe
aatcttatatcatttcaataatccctcccrtctttaacraaaccaaactc

SEQ ID NO: 5031 - DNA, 50 bp, Artificial Sequence
  Description of Artificial Sequence: Synthetic probe
aaataaaatttcactatattaaccaaaataatctcaatctcctaacctca

SEQ ID NO: 5032 - DNA, 50 bp, Artificial Sequence
  Description of Artificial Sequence: Synthetic probe
aaaaaaattcccaataaaaactccraacttcactttctcrtcttctcccc

SEQ ID NO: 5033 - DNA, 50 bp, Artificial Sequence
  Description of Artificial Sequence: Synthetic probe
accrcatccraaacacaatttataccacatataccraaaattcctacaac

SEQ ID NO: 5034 - DNA, 50 bp, Artificial Sequence
  Description of Artificial Sequence: Synthetic probe
crtaaaaaaatacctaaaacacaatatatactcactaactttttattcac

SEQ ID NO: 5035 - DNA, 50 bp, Artificial Sequence
  Description of Artificial Sequence: Synthetic probe
tatattcatctcaattaatacaacaaaatcactcaaaatattcaacaccc

SEQ ID NO: 5036 - DNA, 50 bp, Artificial Sequence
  Description of Artificial Sequence: Synthetic probe
taataaaatttttaaccttttaacattcaaaaattaaataaattctcccc

SEQ ID NO: 5037 - DNA, 50 bp, Artificial Sequence
  Description of Artificial Sequence: Synthetic probe
ggtaaatttygttaagtaggggtaggataaagagtatttgaagtttatyg

SEQ ID NO: 5038 - DNA, 50 bp, Artificial Sequence
  Description of Artificial Sequence: Synthetic probe
tcttaaacctaaaacaacacracttccccctatacrtaaaaaaaataatc

SEQ ID NO: 5039 - DNA, 50 bp, Artificial Sequence
  Description of Artificial Sequence: Synthetic probe
aatcraataactttaaaaacaaccaaaacccraaaattaccttatttctc

SEQ ID NO: 5040 - DNA, 50 bp, Artificial Sequence
  Description of Artificial Sequence: Synthetic probe
aaataactaataaaaatcaaactctcraaaacrcattaccacraaacaac

SEQ ID NO: 5041 - DNA, 50 bp, Artificial Sequence
  Description of Artificial Sequence: Synthetic probe
ctccaaataaatcctaaactcctctacatattcctctacctcataaaaac

SEQ ID NO: 5042 - DNA, 50 bp, Artificial Sequence
  Description of Artificial Sequence: Synthetic probe
taaacaaaaaaaccaaaaaataaaactaacatcaaatttacacactacac

SEQ ID NO: 5043 - DNA, 50 bp, Artificial Sequence
  Description of Artificial Sequence: Synthetic probe
ctattcacacrtaaaaaattactcttatcaccraaactattaaaaacaac

SEQ ID NO: 5044 - DNA, 50 bp, Artificial Sequence
  Description of Artificial Sequence: Synthetic probe
aaatctaaattccattaacttcaaaatccaaactatttctattaactcac

SEQ ID NO: 5045 - DNA, 50 bp, Artificial Sequence
  Description of Artificial Sequence: Synthetic probe
atcacaaccaaacattccctaaaaaatataataccctaacccaattccca

SEQ ID NO: 5046 - DNA, 50 bp, Artificial Sequence
  Description of Artificial Sequence: Synthetic probe
cacaaattactaaaaaccaaaccaaaactcaataaacaaaactaaccaca

SEQ ID NO: 5047 - DNA, 50 bp, Artificial Sequence
  Description of Artificial Sequence: Synthetic probe
ggttgtagttaaatattttttggaggatgtgatattttggtttagttttt

SEQ ID NO: 5048 - DNA, 50 bp, Artificial Sequence
  Description of Artificial Sequence: Synthetic probe
ccccttccacatttctccaaaaaacctaaaccrtaaaatccaaatccaac

SEQ ID NO: 5049 - DNA, 50 bp, Artificial Sequence
  Description of Artificial Sequence: Synthetic probe
taaaataaactttcatatatatatccatcatctaacttcaattcataaac

SEQ ID NO: 5050 - DNA, 50 bp, Artificial Sequence
  Description of Artificial Sequence: Synthetic probe
gttggtgggtggtatatagatatgaatttagatygtttatgaatygagat

SEQ ID NO: 5051 - DNA, 50 bp, Artificial Sequence
  Description of Artificial Sequence: Synthetic probe
raaatttaaaaacrtaaaactccrcaatactcaaccaaacaaaaaacaac

SEQ ID NO: 5052 - DNA, 50 bp, Artificial Sequence
  Description of Artificial Sequence: Synthetic probe
aaacaaaacccaaaacatctttctccactattaccacccraaattcacac

SEQ ID NO: 5053 - DNA, 50 bp, Artificial Sequence
  Description of Artificial Sequence: Synthetic probe
ataaaaacrttatataaaaataaaaccccaaccracaaatcctaatactc

SEQ ID NO: 5054 - DNA, 50 bp, Artificial Sequence
  Description of Artificial Sequence: Synthetic probe
aaaactttttcaataataaacraacaaaactccrcrcrcccaaataacrc

SEQ ID NO: 5055 - DNA, 50 bp, Artificial Sequence
  Description of Artificial Sequence: Synthetic probe
agtttatatagattttgttattagtgttaaattggattgggggattaggt

SEQ ID NO: 5056 - DNA, 50 bp, Artificial Sequence
  Description of Artificial Sequence: Synthetic probe
acccacacaaaccttatcactaataccaaactaaactaaaaaaccaaatc

SEQ ID NO: 5057 - DNA, 50 bp, Artificial Sequence
  Description of Artificial Sequence: Synthetic probe
ccacccctcttcatcttacctacaaatataatatcctaattactaaattc

SEQ ID NO: 5058 - DNA, 50 bp, Artificial Sequence
  Description of Artificial Sequence: Synthetic probe
tctctctttacttaataccaatacaaacctataattctattcttaaaaac

SEQ ID NO: 5059 - DNA, 50 bp, Artificial Sequence
  Description of Artificial Sequence: Synthetic probe
gtttgtgattttgtttttaaaaaygtttggggtaagttgtaggaaagatt

SEQ ID NO: 5060 - DNA, 50 bp, Artificial Sequence
  Description of Artificial Sequence: Synthetic probe
cctataattctattcttaaaaacrtctaaaacaaactacaaaaaaaaccc

SEQ ID NO: 5061 - DNA, 50 bp, Artificial Sequence
  Description of Artificial Sequence: Synthetic probe
cctaaacacttctaaaaacaacraaatcaaaacaaaaattcaccaaacac

SEQ ID NO: 5062 - DNA, 50 bp, Artificial Sequence
  Description of Artificial Sequence: Synthetic probe
tttgttaaggagaaaygttattgattagagagaggtttagttatgtattt

SEQ ID NO: 5063 - DNA, 50 bp, Artificial Sequence
  Description of Artificial Sequence: Synthetic probe
ctactaaaaaaaaacrctactaaccaaaaaaaaatccaatcatatactcc

SEQ ID NO: 5064 - DNA, 50 bp, Artificial Sequence
  Description of Artificial Sequence: Synthetic probe
tcraaatccraactatctctcccraaaccttaaaactaataaaacraaac

SEQ ID NO: 5065 - DNA, 50 bp, Artificial Sequence
  Description of Artificial Sequence: Synthetic probe
ccraaaccraataaaatctactcrcraacccaaaaaaaccrccaaaaaac

SEQ ID NO: 5066 - DNA, 50 bp, Artificial Sequence
  Description of Artificial Sequence: Synthetic probe
aaaaacraaataacaaaacaccaaacrcraattcraccraccaaaaaacc

SEQ ID NO: 5067 - DNA, 50 bp, Artificial Sequence
  Description of Artificial Sequence: Synthetic probe
attaactaaaaatttaactctaaactaacrcaaccaacccraaacractc

SEQ ID NO: 5068 - DNA, 50 bp, Artificial Sequence
  Description of Artificial Sequence: Synthetic probe
tcacrcctcrcrccctttttcattaactaaaaatttaactctaaactaac

SEQ ID NO: 5069 - DNA, 50 bp, Artificial Sequence
  Description of Artificial Sequence: Synthetic probe
aaaccctactaacaaacraaatatcrcraccratcccaaataaatcraac

SEQ ID NO: 5070 - DNA, 50 bp, Artificial Sequence
  Description of Artificial Sequence: Synthetic probe
rtatctttatacaacratatcracrtaaatccraatatcrtcrcctacrc

SEQ ID NO: 5071 - DNA, 50 bp, Artificial Sequence
  Description of Artificial Sequence: Synthetic probe
rcrtatctttatacaacratatcracrtaaatccraatatcrtcrcctac

SEQ ID NO: 5072 - DNA, 50 bp, Artificial Sequence
  Description of Artificial Sequence: Synthetic probe
raatccrcrtatctttatacaacratatcracrtaaatccraatatcrtc

SEQ ID NO: 5073 - DNA, 50 bp, Artificial Sequence
  Description of Artificial Sequence: Synthetic probe
atatacrtacraatccrcrtatctttatacaacratatcracrtaaatcc

SEQ ID NO: 5074 - DNA, 50 bp, Artificial Sequence
  Description of Artificial Sequence: Synthetic probe
aatttatacrtaaaaaatataaatacaaacaccaatacaccrataaacac

SEQ ID NO: 5075 - DNA, 50 bp, Artificial Sequence
  Description of Artificial Sequence: Synthetic probe
aacrcctatcttaatatacraacacraataaacrtatcttaaatttatac

SEQ ID NO: 5076 - DNA, 50 bp, Artificial Sequence
  Description of Artificial Sequence: Synthetic probe
caatataaatatatatcaacrcctatcttaatatacraacacraataaac

SEQ ID NO: 5077 - DNA, 50 bp, Artificial Sequence
  Description of Artificial Sequence: Synthetic probe
cacacacccacactaaaaaactcraaattcacctatctacacacatactc

SEQ ID NO: 5078 - DNA, 50 bp, Artificial Sequence
  Description of Artificial Sequence: Synthetic probe
acaaatatatttcractataatacttaattacatattatatatccataac

SEQ ID NO: 5079 - DNA, 50 bp, Artificial Sequence
  Description of Artificial Sequence: Synthetic probe
cctataaaaaaccccraaattctaccccraaaacrcrattctaaaactac

SEQ ID NO: 5080 - DNA, 50 bp, Artificial Sequence
  Description of Artificial Sequence: Synthetic probe
aaaaaaaacccactccraaaaaaaaacacttttcccrcaaccccaaaatc

SEQ ID NO: 5081 - DNA, 50 bp, Artificial Sequence
  Description of Artificial Sequence: Synthetic probe
taaacraaaactctttcctataaaaaaccccraaattctaccccraaaac

SEQ ID NO: 5082 - DNA, 50 bp, Artificial Sequence
  Description of Artificial Sequence: Synthetic probe
aacctataaacraaaactctttcctataaaaaaccccraaattctacccc

SEQ ID NO: 5083 - DNA, 50 bp, Artificial Sequence
  Description of Artificial Sequence: Synthetic probe
ctccccttcraacaacctataaacraaaactctttcctataaaaaacccc

SEQ ID NO: 5084 - DNA, 50 bp, Artificial Sequence
  Description of Artificial Sequence: Synthetic probe
acractaataaaccccraaaacttttaaaaaaacattcctactatcraac

SEQ ID NO: 5085 - DNA, 50 bp, Artificial Sequence
  Description of Artificial Sequence: Synthetic probe
caacactctaatcaacaacaataaccatccaatcccctataacctccttc

SEQ ID NO: 5086 - DNA, 50 bp, Artificial Sequence
  Description of Artificial Sequence: Synthetic probe
gttgttgattagagtgttgtagtttggtttagggttattattaggtattg

SEQ ID NO: 5087 - DNA, 50 bp, Artificial Sequence
  Description of Artificial Sequence: Synthetic probe
ctactaatcaaaatactataatttaattcaaaactactaccaaacactac

SEQ ID NO: 5088 - DNA, 50 bp, Artificial Sequence
  Description of Artificial Sequence: Synthetic probe
aacaccraacaatcctccataaaaaaaaccttcacaaccatatcraaatc

SEQ ID NO: 5089 - DNA, 50 bp, Artificial Sequence
  Description of Artificial Sequence: Synthetic probe
cttccctaatcacaatactactatacccttaaaccttcaaaaaaacttcc

SEQ ID NO: 5090 - DNA, 50 bp, Artificial Sequence
  Description of Artificial Sequence: Synthetic probe
taatcacaatactactatacccttaaaccttcaaaaaaacttccratttc

SEQ ID NO: 5091 - DNA, 50 bp, Artificial Sequence
  Description of Artificial Sequence: Synthetic probe
actaaaaacaccraacaatcctccataaaaaaaaccttcacaaccatatc

SEQ ID NO: 5092 - DNA, 50 bp, Artificial Sequence
  Description of Artificial Sequence: Synthetic probe
ctcaccttaacaataaaataaatctttcracccttctcactaaaaacacc

SEQ ID NO: 5093 - DNA, 50 bp, Artificial Sequence
  Description of Artificial Sequence: Synthetic probe
acttccratttcratataactataaaaacccctcccataaaaaactaccc

SEQ ID NO: 5094 - DNA, 50 bp, Artificial Sequence
  Description of Artificial Sequence: Synthetic probe
ccaccctccaacaccatcctaactcaccttaacaataaaataaatctttc

SEQ ID NO: 5095 - DNA, 50 bp, Artificial Sequence
  Description of Artificial Sequence: Synthetic probe
taaaaacccctcccataaaaaactacccratacctccaataaaaaaaacc

SEQ ID NO: 5096 - DNA, 50 bp, Artificial Sequence
  Description of Artificial Sequence: Synthetic probe
tacccaaaaccctaactaacaatccctacctctcctaaatctataactac

SEQ ID NO: 5097 - DNA, 50 bp, Artificial Sequence
  Description of Artificial Sequence: Synthetic probe
aataaatcactatatattaccaaatccacctcratcttaactaatccctc

SEQ ID NO: 5098 - DNA, 50 bp, Artificial Sequence
  Description of Artificial Sequence: Synthetic probe
acaatccctacctctcctaaatctataactacraaaaaccaaccaaaatc

SEQ ID NO: 5099 - DNA, 50 bp, Artificial Sequence
  Description of Artificial Sequence: Synthetic probe
ctataaacataaacacraaataaatcactatatattaccaaatccacctc

SEQ ID NO: 5100 - DNA, 50 bp, Artificial Sequence
  Description of Artificial Sequence: Synthetic probe
aatccccaactccraacattacttacccaccaaactataaacataaacac

SEQ ID NO: 5101 - DNA, 50 bp, Artificial Sequence
  Description of Artificial Sequence: Synthetic probe
agggattagttaagatygaggtggatttggtaatatatagtgatttattt

SEQ ID NO: 5102 - DNA, 50 bp, Artificial Sequence
  Description of Artificial Sequence: Synthetic probe
aaaaccaaccaaaatcraaataaacctaataacacacaataacccacctc

SEQ ID NO: 5103 - DNA, 50 bp, Artificial Sequence
  Description of Artificial Sequence: Synthetic probe
agatttttagtttygagtattgtttgtttattagattgtgggtatgagta

SEQ ID NO: 5104 - DNA, 50 bp, Artificial Sequence
  Description of Artificial Sequence: Synthetic probe
aataacccacctcrtactcatacccacaatctaataaacaaacaatactc

SEQ ID NO: 5105 - DNA, 50 bp, Artificial Sequence
  Description of Artificial Sequence: Synthetic probe
tagtgatttatttygtgtttatgtttatagtttggtgggtaagtaatgtt

SEQ ID NO: 5106 - DNA, 50 bp, Artificial Sequence
  Description of Artificial Sequence: Synthetic probe
rtaaaaaacacctactaaacaatcatatccttaaaccccacaaaaacrac

SEQ ID NO: 5107 - DNA, 50 bp, Artificial Sequence
  Description of Artificial Sequence: Synthetic probe
aacrtaaaaaacacctactaaacaatcatatccttaaaccccacaaaaac

SEQ ID NO: 5108 - DNA, 50 bp, Artificial Sequence
  Description of Artificial Sequence: Synthetic probe
atacccacaatctaataaacaaacaatactcraaactaaaaatctacrcc

SEQ ID NO: 5109 - DNA, 50 bp, Artificial Sequence
  Description of Artificial Sequence: Synthetic probe
rccrtttctataaaacccaaaaacataactacccaataaataccctctac

SEQ ID NO: 5110 - DNA, 50 bp, Artificial Sequence
  Description of Artificial Sequence: Synthetic probe
atacaaaaacttcaaaaacaacractccrctctaaaccccaaaaccttac

SEQ ID NO: 5111 - DNA, 50 bp, Artificial Sequence
  Description of Artificial Sequence: Synthetic probe
aaaactacaaaaaacacccaatatacacatttactaaaaacaaaaacttc

SEQ ID NO: 5112 - DNA, 50 bp, Artificial Sequence
  Description of Artificial Sequence: Synthetic probe
aaccctaccacatataaactaaataatcctaaacaaatcatttccccccc

SEQ ID NO: 5113 - DNA, 50 bp, Artificial Sequence
  Description of Artificial Sequence: Synthetic probe
caaaacctactatcttatccattcraaaaatcttcaaatttaataccccc

SEQ ID NO: 5114 - DNA, 50 bp, Artificial Sequence
  Description of Artificial Sequence: Synthetic probe
caaataaacttcatctccaccccrcacaaaacctactatcttatccattc

SEQ ID NO: 5115 - DNA, 50 bp, Artificial Sequence
  Description of Artificial Sequence: Synthetic probe
catatcccactccataaaatctccraaaacatcaaacctaaaaatttctc

SEQ ID NO: 5116 - DNA, 50 bp, Artificial Sequence
  Description of Artificial Sequence: Synthetic probe
aacatcaaacctaaaaatttctcraataaacaaaacaacaaactctatac

SEQ ID NO: 5117 - DNA, 50 bp, Artificial Sequence
  Description of Artificial Sequence: Synthetic probe
ctcacctttctacaccttatcacaaaacaaataaacttcatctccacccc

SEQ ID NO: 5118 - DNA, 50 bp, Artificial Sequence
  Description of Artificial Sequence: Synthetic probe
gggtattaaatttgaagatttttygaatggataagatagtaggttttgtg

SEQ ID NO: 5119 - DNA, 50 bp, Artificial Sequence
  Description of Artificial Sequence: Synthetic probe
aataatataatctcaacttactacaacctcttatctcccaaaattcaaac

SEQ ID NO: 5120 - DNA, 50 bp, Artificial Sequence
  Description of Artificial Sequence: Synthetic probe
aaaaaaaaccraaactaccacctataaatacaaacaaaactataaaaaac

SEQ ID NO: 5121 - DNA, 50 bp, Artificial Sequence
  Description of Artificial Sequence: Synthetic probe
raaacctacractcrcactaaaaaatcctaaaaaaaacrcttaactccrc

SEQ ID NO: 5122 - DNA, 50 bp, Artificial Sequence
  Description of Artificial Sequence: Synthetic probe
ccraaacctacractcrcactaaaaaatcctaaaaaaaacrcttaactcc

SEQ ID NO: 5123 - DNA, 50 bp, Artificial Sequence
  Description of Artificial Sequence: Synthetic probe
tcraactacraaccacaaaaaacrtaaatcaaaactaaatcctcaacccc

SEQ ID NO: 5124 - DNA, 50 bp, Artificial Sequence
  Description of Artificial Sequence: Synthetic probe
aacaccraaaccraacttaaaacctaacrtatccraaaactacaaaaccc

SEQ ID NO: 5125 - DNA, 50 bp, Artificial Sequence
  Description of Artificial Sequence: Synthetic probe
ttaaacaaaacttataaacaccraaaccraacttaaaacctaacrtatcc

SEQ ID NO: 5126 - DNA, 50 bp, Artificial Sequence
  Description of Artificial Sequence: Synthetic probe
aaactaaaatttaaaaaaaccaaacaacttaaacaaaacttataaacacc

SEQ ID NO: 5127 - DNA, 50 bp, Artificial Sequence
  Description of Artificial Sequence: Synthetic probe
gtagtattttttgaggtaggtaagtgttatgattgtattttttgtayggt

SEQ ID NO: 5128 - DNA, 50 bp, Artificial Sequence
  Description of Artificial Sequence: Synthetic probe
caacaccttttaaaataaataaatactataactataccccttacacratc

SEQ ID NO: 5129 - DNA, 50 bp, Artificial Sequence
  Description of Artificial Sequence: Synthetic probe
aaaacccaacacrtaacccaaaacatcrctatacctacacttaacrtttc

SEQ ID NO: 5130 - DNA, 50 bp, Artificial Sequence
  Description of Artificial Sequence: Synthetic probe
accrtacaaaaaatacaatcataacacttacctacctcaaaaaatactac

SEQ ID NO: 5131 - DNA, 50 bp, Artificial Sequence
  Description of Artificial Sequence: Synthetic probe
acacttacctacctcaaaaaatactacraaacrttaaatacaaacacaac

SEQ ID NO: 5132 - DNA, 50 bp, Artificial Sequence
  Description of Artificial Sequence: Synthetic probe
aaaaaatactacraaacrttaaatacaaacacaacrataccctaaaccac

SEQ ID NO: 5133 - DNA, 50 bp, Artificial Sequence
  Description of Artificial Sequence: Synthetic probe
tctaaaaattaaaaaacraaaatctaacccaaccactcaaaacatccttc

SEQ ID NO: 5134 - DNA, 50 bp, Artificial Sequence
  Description of Artificial Sequence: Synthetic probe
ttgggygtggtggatgatatagattatttgtttaatgatattggtttgtt

SEQ ID NO: 5135 - DNA, 50 bp, Artificial Sequence
  Description of Artificial Sequence: Synthetic probe
taaacrtaataaataacataaactatctactcaataacactaatctaccc

SEQ ID NO: 5136 - DNA, 50 bp, Artificial Sequence
  Description of Artificial Sequence: Synthetic probe
tccacraacaaaccaatatcattaaacaaataatctatatcatccaccac

SEQ ID NO: 5137 - DNA, 50 bp, Artificial Sequence
  Description of Artificial Sequence: Synthetic probe
atttaygggtagattagtgttattgagtagatagtttatgttatttatta

SEQ ID NO: 5138 - DNA, 50 bp, Artificial Sequence
  Description of Artificial Sequence: Synthetic probe
cccaataaacrcccccrcacctaatacaaataattaataaaattaacaac

SEQ ID NO: 5139 - DNA, 50 bp, Artificial Sequence
  Description of Artificial Sequence: Synthetic probe
atatcattaaacaaataatctatatcatccaccacrcccaaaacctcrac

SEQ ID NO: 5140 - DNA, 50 bp, Artificial Sequence
  Description of Artificial Sequence: Synthetic probe
aaaaaacaaataaatctcraacctaactcaccctactttcatccccaaac

SEQ ID NO: 5141 - DNA, 50 bp, Artificial Sequence
  Description of Artificial Sequence: Synthetic probe
ccaacaaaactaaatctacacctacccrcaacaaaaaactcaccacactc

SEQ ID NO: 5142 - DNA, 50 bp, Artificial Sequence
  Description of Artificial Sequence: Synthetic probe
tttagtagagttgggtttgtatttattygtagtagaaagtttattatatt

SEQ ID NO: 5143 - DNA, 50 bp, Artificial Sequence
  Description of Artificial Sequence: Synthetic probe
acacctaacrataatcacraaacaaacraatataataaactttctactac

SEQ ID NO: 5144 - DNA, 50 bp, Artificial Sequence
  Description of Artificial Sequence: Synthetic probe
cataactaaatctccataccratccaacaaaactaaatctacacctaccc

SEQ ID NO: 5145 - DNA, 50 bp, Artificial Sequence
  Description of Artificial Sequence: Synthetic probe
tataataaactttctactacraataaatacaaacccaactctactaaatc

SEQ ID NO: 5146 - DNA, 50 bp, Artificial Sequence
  Description of Artificial Sequence: Synthetic probe
acaaacccaactctactaaatcracataaaaactcaaccatacatctaac

SEQ ID NO: 5147 - DNA, 50 bp, Artificial Sequence
  Description of Artificial Sequence: Synthetic probe
cccaactctactaaatcracataaaaactcaaccatacatctaacrctac

SEQ ID NO: 5148 - DNA, 50 bp, Artificial Sequence
  Description of Artificial Sequence: Synthetic probe
ttttattttgaagtagtgtaygtagtagtttaggagtattagygtttgtt

SEQ ID NO: 5149 - DNA, 50 bp, Artificial Sequence
  Description of Artificial Sequence: Synthetic probe
acctaactttaaaaataaactccccatctcacctaactaaaaaaacaaac

SEQ ID NO: 5150 - DNA, 50 bp, Artificial Sequence
  Description of Artificial Sequence: Synthetic probe
caaaaataaacactaaaactaaaccctccccttataaacaaaaaccaaac

SEQ ID NO: 5151 - DNA, 50 bp, Artificial Sequence
  Description of Artificial Sequence: Synthetic probe
tcatctataacatataatactatatactacttctcatttcataacacacc

SEQ ID NO: 5152 - DNA, 50 bp, Artificial Sequence
  Description of Artificial Sequence: Synthetic probe
aaaaaaaaaaccataaaaaacttaaccaatcractaccrcatctacaaac

SEQ ID NO: 5153 - DNA, 50 bp, Artificial Sequence
  Description of Artificial Sequence: Synthetic probe
aaataacaatttcraattcacacraaaacraacrtaccatttccrcrcac

SEQ ID NO: 5154 - DNA, 50 bp, Artificial Sequence
  Description of Artificial Sequence: Synthetic probe
atcccaattttataaaaaataattatactcactcractcaccaccaaatc

SEQ ID NO: 5155 - DNA, 50 bp, Artificial Sequence
  Description of Artificial Sequence: Synthetic probe
aataaaacatcttataaattaaaacaaatactactactaaaatccctaac

SEQ ID NO: 5156 - DNA, 50 bp, Artificial Sequence
  Description of Artificial Sequence: Synthetic probe
aaatttaaaaaaattacatttaataccttttttcacattactatataacc

SEQ ID NO: 5157 - DNA, 50 bp, Artificial Sequence
  Description of Artificial Sequence: Synthetic probe
actaaaaaaacraacccccaacrtcraccrttaaaccrtattaaaaaaac

SEQ ID NO: 5158 - DNA, 50 bp, Artificial Sequence
  Description of Artificial Sequence: Synthetic probe
aaaacaataaactactatcaaaacccattaatcraaaataaaaacccccc

SEQ ID NO: 5159 - DNA, 50 bp, Artificial Sequence
  Description of Artificial Sequence: Synthetic probe
aaataaataatcaaaaatatatatcattatcataaaaaccccataccatc

SEQ ID NO: 5160 - DNA, 50 bp, Artificial Sequence
  Description of Artificial Sequence: Synthetic probe
acatactaaactccttaaaaaatattcrtataacacaacatctttctacc

SEQ ID NO: 5161 - DNA, 50 bp, Artificial Sequence
  Description of Artificial Sequence: Synthetic probe
actcaaaaactccatccaaaactccataaaactaaaccrataactctttc

SEQ ID NO: 5162 - DNA, 50 bp, Artificial Sequence
  Description of Artificial Sequence: Synthetic probe
taaattcctaacctaacccacaaaaaaaaccaaacratcaatcccattcc

SEQ ID NO: 5163 - DNA, 50 bp, Artificial Sequence
  Description of Artificial Sequence: Synthetic probe
acaaacataaaccaccacacccaactaacaaaacctattctattaaaaac

SEQ ID NO: 5164 - DNA, 50 bp, Artificial Sequence
  Description of Artificial Sequence: Synthetic probe
tattccctcatttaaaaaacaacttaaaaatacattaatctacccaacrc

SEQ ID NO: 5165 - DNA, 50 bp, Artificial Sequence
  Description of Artificial Sequence: Synthetic probe
aaaaaactaccctctaacccaactttctcratacctccaaataaaaaacc

SEQ ID NO: 5166 - DNA, 50 bp, Artificial Sequence
  Description of Artificial Sequence: Synthetic probe
raaaataaaacaaccaaacaatcraaactatatataaccaaacaaaaacc

SEQ ID NO: 5167 - DNA, 50 bp, Artificial Sequence
  Description of Artificial Sequence: Synthetic probe
ttcaacctacctctttaaacatattaataaaatcaataatttttcaattc

SEQ ID NO: 5168 - DNA, 50 bp, Artificial Sequence
  Description of Artificial Sequence: Synthetic probe
taaatctcttacaaaattacaataacraccacctaatcaataaaatcaac

SEQ ID NO: 5169 - DNA, 50 bp, Artificial Sequence
  Description of Artificial Sequence: Synthetic probe
aaaaacctctctataaataccctaatacacaactctattatataaacatc

SEQ ID NO: 5170 - DNA, 50 bp, Artificial Sequence
  Description of Artificial Sequence: Synthetic probe
ctccraccaaaacttacraaaccraaaatatcctaaatctcraaaaaacc

SEQ ID NO: 5171 - DNA, 50 bp, Artificial Sequence
  Description of Artificial Sequence: Synthetic probe
gtygttgaggtatayggttttagataaatatattgtttgttttatagggg

SEQ ID NO: 5172 - DNA, 50 bp, Artificial Sequence
  Description of Artificial Sequence: Synthetic probe
tcrttaaaatacacracctcaaataaatacattatctaccccacaaaaac

SEQ ID NO: 5173 - DNA, 50 bp, Artificial Sequence
  Description of Artificial Sequence: Synthetic probe
aacrcaataacrtctaaatttaaacccactaaatacrtcraaacatctcc

SEQ ID NO: 5174 - DNA, 50 bp, Artificial Sequence
  Description of Artificial Sequence: Synthetic probe
tacaaaaccctaaaaaattacrcrataccatcaaaatcatacaaaaattc

SEQ ID NO: 5175 - DNA, 50 bp, Artificial Sequence
  Description of Artificial Sequence: Synthetic probe
aaaactcataatattccttttcctaatccctacaaatctaattctccrac

SEQ ID NO: 5176 - DNA, 50 bp, Artificial Sequence
  Description of Artificial Sequence: Synthetic probe
actaaacaacaaacctactataaccaaaataccatactaccrtactacac

SEQ ID NO: 5177 - DNA, 50 bp, Artificial Sequence
  Description of Artificial Sequence: Synthetic probe
gattgggtagtaagtttattgtagttagggtattatgttatygtgttgta

SEQ ID NO: 5178 - DNA, 50 bp, Artificial Sequence
  Description of Artificial Sequence: Synthetic probe
actcacratcaaaaacraaaacctactaaaaaacacraccrcraaaactc

SEQ ID NO: 5179 - DNA, 50 bp, Artificial Sequence
  Description of Artificial Sequence: Synthetic probe
craaaaaaactctaaacctcrcrctaaattccaaacaaataaccccraac

SEQ ID NO: 5180 - DNA, 50 bp, Artificial Sequence
  Description of Artificial Sequence: Synthetic probe
ataaataacaccraaaataaaattaatccrcctacctctcctacrcctac

SEQ ID NO: 5181 - DNA, 50 bp, Artificial Sequence
  Description of Artificial Sequence: Synthetic probe
ctctttcaacctaaatcccttctacaataatcctatcatatacttctaac

SEQ ID NO: 5182 - DNA, 50 bp, Artificial Sequence
  Description of Artificial Sequence: Synthetic probe
aaaacctaaaaaacctaaaaccracttctatcctacaaaaaaaataatac

SEQ ID NO: 5183 - DNA, 50 bp, Artificial Sequence
  Description of Artificial Sequence: Synthetic probe
aaccacccttaaaccctataatccatcctctctcctaactaaataaatcc

SEQ ID NO: 5184 - DNA, 50 bp, Artificial Sequence
  Description of Artificial Sequence: Synthetic probe
cctaaaaatttcccaacttatatacrctacctctaacatcctaaaaaccc

SEQ ID NO: 5185 - DNA, 50 bp, Artificial Sequence
  Description of Artificial Sequence: Synthetic probe
aaactaaaaaccaatcccactcctactaatccacttttccacratcaaac

SEQ ID NO: 5186 - DNA, 50 bp, Artificial Sequence
  Description of Artificial Sequence: Synthetic probe
ttcttaattaatctaaacttttctaaacatactaatctattccctaacrc

SEQ ID NO: 5187 - DNA, 50 bp, Artificial Sequence
  Description of Artificial Sequence: Synthetic probe
aacrctatattccaaaaccatataccrcrttatataacraaaaataaaac

SEQ ID NO: 5188 - DNA, 50 bp, Artificial Sequence
  Description of Artificial Sequence: Synthetic probe
ataactaaaaatataataacaataaaaaaaatctaaccctaacccactcc

SEQ ID NO: 5189 - DNA, 50 bp, Artificial Sequence
  Description of Artificial Sequence: Synthetic probe
tccttcctaaactacccrtaatttaaaaaaacttccaaaataccttccac

SEQ ID NO: 5190 - DNA, 50 bp, Artificial Sequence
  Description of Artificial Sequence: Synthetic probe
tttattaaaggttatatattattgyggagtggggtggggtttgaattttt

SEQ ID NO: 5191 - DNA, 50 bp, Artificial Sequence
  Description of Artificial Sequence: Synthetic probe
ctatcaaaaaccacacatcactacraaataaaataaaacttaaatttccc

SEQ ID NO: 5192 - DNA, 50 bp, Artificial Sequence
  Description of Artificial Sequence: Synthetic probe
tttaataaaaaatcacaaaaccttataaaaaatttatataaacaatcctc

SEQ ID NO: 5193 - DNA, 50 bp, Artificial Sequence
  Description of Artificial Sequence: Synthetic probe
caaaaccttataaaaaatttatataaacaatcctcratatctcaaaacac

SEQ ID NO: 5194 - DNA, 50 bp, Artificial Sequence
  Description of Artificial Sequence: Synthetic probe
ttaacctttattcraccaaaaacatcaacaaacttaacatctcaaacacc

SEQ ID NO: 5195 - DNA, 50 bp, Artificial Sequence
  Description of Artificial Sequence: Synthetic probe
aattttaaaactcratatttaaaatattaaatctactaatactcctaacc

SEQ ID NO: 5196 - DNA, 50 bp, Artificial Sequence
  Description of Artificial Sequence: Synthetic probe
atactcctaaccraataaaaaccaaataaaaccctttctttcctcaactc

SEQ ID NO: 5197 - DNA, 50 bp, Artificial Sequence
  Description of Artificial Sequence: Synthetic probe
acraaaaattcaacaaacccatacaatatactaccaaaactaaaaaaaac

SEQ ID NO: 5198 - DNA, 50 bp, Artificial Sequence
  Description of Artificial Sequence: Synthetic probe
caaactttaccaaaatcaaaactcraaattcatataaatccttaaatccc

SEQ ID NO: 5199 - DNA, 50 bp, Artificial Sequence
  Description of Artificial Sequence: Synthetic probe
aaaccaaaatatcttcaaaatctaccctaaaatccaaatctcctacccac

SEQ ID NO: 5200 - DNA, 50 bp, Artificial Sequence
  Description of Artificial Sequence: Synthetic probe
atagtttagagaaatygatatyggggatttgtgaaattagaagtttttta

SEQ ID NO: 5201 - DNA, 50 bp, Artificial Sequence
  Description of Artificial Sequence: Synthetic probe
aactataaaatcrtaaaataaacaaaaataacctctctctacatctaatc

SEQ ID NO: 5202 - DNA, 50 bp, Artificial Sequence
  Description of Artificial Sequence: Synthetic probe
aacccraaaaaaacaatatacccrtcaaaaatctctaacraaactaattc

SEQ ID NO: 5203 - DNA, 50 bp, Artificial Sequence
  Description of Artificial Sequence: Synthetic probe
tatcctcraccaatccrctaaatccttattacctattaaacccctaatac

SEQ ID NO: 5204 - DNA, 50 bp, Artificial Sequence
  Description of Artificial Sequence: Synthetic probe
ttaactcaatttaaataatcccaattttaataacaacaaccaaaacatca

SEQ ID NO: 5205 - DNA, 50 bp, Artificial Sequence
  Description of Artificial Sequence: Synthetic probe
aaaaattctttcctaaactttaaatccccactatcaaacttcaataaaac

SEQ ID NO: 5206 - DNA, 50 bp, Artificial Sequence
  Description of Artificial Sequence: Synthetic probe
ctaaactccattactaaccraatcttaattctttaaaccacrccraaaac

SEQ ID NO: 5207 - DNA, 50 bp, Artificial Sequence
  Description of Artificial Sequence: Synthetic probe
aaatttaaaaaaaccaaacaacttaaacaaaacttataaacaccraaacc

SEQ ID NO: 5208 - DNA, 50 bp, Artificial Sequence
  Description of Artificial Sequence: Synthetic probe
ttttcttctcttttttaatcaaacaatacaatatttccatcaaaataaac

SEQ ID NO: 5209 - DNA, 50 bp, Artificial Sequence
  Description of Artificial Sequence: Synthetic probe
crcrccatatactctataacaaattccaattcacttaaaaaatactcacc

SEQ ID NO: 5210 - DNA, 50 bp, Artificial Sequence
  Description of Artificial Sequence: Synthetic probe
ttttatggtttaggayggggttttgttagttatttgattttatatggaag

SEQ ID NO: 5211 - DNA, 50 bp, Artificial Sequence
  Description of Artificial Sequence: Synthetic probe
cttataatccaaaacraaattctaccaaccatttaaccccacataaaaac

SEQ ID NO: 5212 - DNA, 50 bp, Artificial Sequence
  Description of Artificial Sequence: Synthetic probe
gatgagaaataggaagaaaagagatatggttgtgagatattataagttta

SEQ ID NO: 5213 - DNA, 50 bp, Artificial Sequence
  Description of Artificial Sequence: Synthetic probe
atttattaaggtttggaggtttaaggagttagtattgtatgaaattttta

SEQ ID NO: 5214 - DNA, 50 bp, Artificial Sequence
  Description of Artificial Sequence: Synthetic probe
tccattaaaacctaaaaacctaaaaaattaatattatataaaatccctac

SEQ ID NO: 5215 - DNA, 50 bp, Artificial Sequence
  Description of Artificial Sequence: Synthetic probe
rccaatccaataccrtttcttctacaccraaataatattccaaaacccac

SEQ ID NO: 5216 - DNA, 50 bp, Artificial Sequence
  Description of Artificial Sequence: Synthetic probe
aaaaccactatccttaacaaactaatacaaaaacaaaaaaccaaatacca

SEQ ID NO: 5217 - DNA, 50 bp, Artificial Sequence
  Description of Artificial Sequence: Synthetic probe
cataaataataattatcaaaccaaaccatcrcatcccaaaccaaaccatc

SEQ ID NO: 5218 - DNA, 50 bp, Artificial Sequence
  Description of Artificial Sequence: Synthetic probe
ctatttacrtaaatttatctaaaatcataaaactctaaattacattcccc

SEQ ID NO: 5219 - DNA, 50 bp, Artificial Sequence
  Description of Artificial Sequence: Synthetic probe
attttttttctaacaaatttctaacaatatcttctatcactaaaaattac

SEQ ID NO: 5220 - DNA, 50 bp, Artificial Sequence
  Description of Artificial Sequence: Synthetic probe
ggtattagaagtttttgagagtttttagagaaaggtttttaaaaatgtag

SEQ ID NO: 5221 - DNA, 50 bp, Artificial Sequence
  Description of Artificial Sequence: Synthetic probe
cataccaaaaatacaaaaccacaacactacccaaaaaaccrtcttcatac

SEQ ID NO: 5222 - DNA, 50 bp, Artificial Sequence
  Description of Artificial Sequence: Synthetic probe
ttatgttaaaggtgtagagttatagtattgtttagaaggtygtttttatg

SEQ ID NO: 5223 - DNA, 50 bp, Artificial Sequence
  Description of Artificial Sequence: Synthetic probe
caaaaacacctaccrcaataaaaccrctcaaaccacaaactctcttaaac

SEQ ID NO: 5224 - DNA, 50 bp, Artificial Sequence
  Description of Artificial Sequence: Synthetic probe
ctcaaaattctcttaaatcccaatcaccccaatctcaaacctttaaaatc

SEQ ID NO: 5225 - DNA, 50 bp, Artificial Sequence
  Description of Artificial Sequence: Synthetic probe
aaaactcaaatataaatctaaactttctaaaactaactacctcaaatcac

SEQ ID NO: 5226 - DNA, 50 bp, Artificial Sequence
  Description of Artificial Sequence: Synthetic probe
tccccaaatataataaacaattcctctccracactaaaaaacaccttccc

SEQ ID NO: 5227 - DNA, 50 bp, Artificial Sequence
  Description of Artificial Sequence: Synthetic probe
craaaacaatttatcaattcttttcaaccaaaaaacaaataccaaccaac

SEQ ID NO: 5228 - DNA, 50 bp, Artificial Sequence
  Description of Artificial Sequence: Synthetic probe
ctaactaccttttcctttaaaaattttcttaaaaaactctaaaaaaaccc

SEQ ID NO: 5229 - DNA, 50 bp, Artificial Sequence
  Description of Artificial Sequence: Synthetic probe
cataactacccacaaaatatcrtaccttaatttaccaaataacaaacaac

SEQ ID NO: 5230 - DNA, 50 bp, Artificial Sequence
  Description of Artificial Sequence: Synthetic probe
gtatgattatttatagggtatygtgttttaatttattaggtgataggtaa

SEQ ID NO: 5231 - DNA, 50 bp, Artificial Sequence
  Description of Artificial Sequence: Synthetic probe
cataaacttcaataaacttctactccctcaaatacttcaaaaaaaaaatc

SEQ ID NO: 5232 - DNA, 50 bp, Artificial Sequence
  Description of Artificial Sequence: Synthetic probe
gtgtttggtttgtaagaagaatttaatggatatyggttattgtttttttg

SEQ ID NO: 5233 - DNA, 50 bp, Artificial Sequence
  Description of Artificial Sequence: Synthetic probe
tacctaacctacaaaaaaaacttaataaatatcractactatctttctac

SEQ ID NO: 5234 - DNA, 50 bp, Artificial Sequence
  Description of Artificial Sequence: Synthetic probe
ctcttttctcttatcaacccacaaaattcttccaatccctaaataaaaac

SEQ ID NO: 5235 - DNA, 50 bp, Artificial Sequence
  Description of Artificial Sequence: Synthetic probe
acraacrtaataataccataaaccatctcaatctaaacrttcctttctcc

SEQ ID NO: 5236 - DNA, 50 bp, Artificial Sequence
  Description of Artificial Sequence: Synthetic probe
aataaccracracaaaaactatcaataaacaactactacttccataaaac

SEQ ID NO: 5237 - DNA, 50 bp, Artificial Sequence
  Description of Artificial Sequence: Synthetic probe
tattaaatacttaccacataccaaatattctaattacttttaccatactc

SEQ ID NO: 5238 - DNA, 50 bp, Artificial Sequence
  Description of Artificial Sequence: Synthetic probe
ttggtggtgttttttagtataattttyggygttgattgtgtagttatttt

SEQ ID NO: 5239 - DNA, 50 bp, Artificial Sequence
  Description of Artificial Sequence: Synthetic probe
taataatactttttaacacaactttcracrctaactatacaaccatcttc

SEQ ID NO: 5240 - DNA, 50 bp, Artificial Sequence
  Description of Artificial Sequence: Synthetic probe
acttattactaaacaactaaacttcrtactcraaaatccttaacccatac

SEQ ID NO: 5241 - DNA, 50 bp, Artificial Sequence
  Description of Artificial Sequence: Synthetic probe
ataatctaaaatctaaacactaacaaaaccaaactaacaactctaacccc

SEQ ID NO: 5242 - DNA, 50 bp, Artificial Sequence
  Description of Artificial Sequence: Synthetic probe
taccccrtatttctaaacctactctatttacctcttacattataactctc

SEQ ID NO: 5243 - DNA, 50 bp, Artificial Sequence
  Description of Artificial Sequence: Synthetic probe
agagatttttgaatagtatygggggtygttatagtttatgaggatatttt

SEQ ID NO: 5244 - DNA, 50 bp, Artificial Sequence
  Description of Artificial Sequence: Synthetic probe
aaaatccctaaataacaccraaaaccrttacaacccataaaaacatctcc

SEQ ID NO: 5245 - DNA, 50 bp, Artificial Sequence
  Description of Artificial Sequence: Synthetic probe
aacaaaactacaaaaaaacaaccctactcccractttaatccattcatcc

SEQ ID NO: 5246 - DNA, 50 bp, Artificial Sequence
  Description of Artificial Sequence: Synthetic probe
aaaccrcactactaactatcataactttattaaacaaaaaaaaccctaac

SEQ ID NO: 5247 - DNA, 50 bp, Artificial Sequence
  Description of Artificial Sequence: Synthetic probe
taactacaacaactaccrccctaacctatctcttaccaaaactataaaac

SEQ ID NO: 5248 - DNA, 50 bp, Artificial Sequence
  Description of Artificial Sequence: Synthetic probe
aaattataactcaacaaaaacaacaacactaaaaaacaactcccaatctc

SEQ ID NO: 5249 - DNA, 50 bp, Artificial Sequence
  Description of Artificial Sequence: Synthetic probe
taacataaacrcaatcaaaaaatctactccaaacaaacactaataatccc

SEQ ID NO: 5250 - DNA, 50 bp, Artificial Sequence
  Description of Artificial Sequence: Synthetic probe
ctaattcrcactaaaaacccaacaaacaataaaaacccaacraattaacc

SEQ ID NO: 5251 - DNA, 50 bp, Artificial Sequence
  Description of Artificial Sequence: Synthetic probe
actctataactacctattctcttctttattcrtaaaaaaatctctattac

SEQ ID NO: 5252 - DNA, 50 bp, Artificial Sequence
  Description of Artificial Sequence: Synthetic probe
acttaaaaacctcctaaaccataaaaaaattatataacatcaaaaccatc

SEQ ID NO: 5253 - DNA, 50 bp, Artificial Sequence
  Description of Artificial Sequence: Synthetic probe
actatcctcracatctaactatcctctcaacattaccaaataaaacacac

SEQ ID NO: 5254 - DNA, 50 bp, Artificial Sequence
  Description of Artificial Sequence: Synthetic probe
acctacttcrtatattttatctaacaatactaaaaaaacaactaaatatc

SEQ ID NO: 5255 - DNA, 50 bp, Artificial Sequence
  Description of Artificial Sequence: Synthetic probe
tgtttatttygtgtgttttatttggtaatgttgagaggatagttagatgt

SEQ ID NO: 5256 - DNA, 50 bp, Artificial Sequence
  Description of Artificial Sequence: Synthetic probe
tttttactcrtaaaaacccataatcaataattctttatataacaaacaac

SEQ ID NO: 5257 - DNA, 50 bp, Artificial Sequence
  Description of Artificial Sequence: Synthetic probe
ctcacatccrttatctattatacaaaaaactactaattataaatctctac

SEQ ID NO: 5258 - DNA, 50 bp, Artificial Sequence
  Description of Artificial Sequence: Synthetic probe
ccctactcccatctcccctataccctataaatattctaccatttttactc

SEQ ID NO: 5259 - DNA, 50 bp, Artificial Sequence
  Description of Artificial Sequence: Synthetic probe
acaaaaattaaacttcaaaatacttctccaaataaaaataatcaaaaccc

SEQ ID NO: 5260 - DNA, 50 bp, Artificial Sequence
  Description of Artificial Sequence: Synthetic probe
attgtatttatttgatagttaagatattgagttttagagtagtgaaatgt

SEQ ID NO: 5261 - DNA, 50 bp, Artificial Sequence
  Description of Artificial Sequence: Synthetic probe
tattaactaacccraaacactacccaattacaaattaaaaaaaattaatc

SEQ ID NO: 5262 - DNA, 50 bp, Artificial Sequence
  Description of Artificial Sequence: Synthetic probe
ttattggttggttygggatattgtttagttataaattaaggaagattgat

SEQ ID NO: 5263 - DNA, 50 bp, Artificial Sequence
  Description of Artificial Sequence: Synthetic probe
acaaaaatcccaaataaaaacaaacctataaaaacccccraaatcaaaac

SEQ ID NO: 5264 - DNA, 50 bp, Artificial Sequence
  Description of Artificial Sequence: Synthetic probe
ggtagaagttttaggtggaagtaagtttatagagattttygagattaagg

SEQ ID NO: 5265 - DNA, 50 bp, Artificial Sequence
  Description of Artificial Sequence: Synthetic probe
ccaaaataaaaactaactccraaactaactaactccrcaaatccrctaac

SEQ ID NO: 5266 - DNA, 50 bp, Artificial Sequence
  Description of Artificial Sequence: Synthetic probe
aaataaaaactaactccraaactaactaactccrcaaatccrctaacrtc

SEQ ID NO: 5267 - DNA, 50 bp, Artificial Sequence
  Description of Artificial Sequence: Synthetic probe
aacaacaacaaaaaaatcaacaaaatcaacctaaaaaccatctaaacrac

SEQ ID NO: 5268 - DNA, 50 bp, Artificial Sequence
  Description of Artificial Sequence: Synthetic probe
aacaacaacaacaaaaaaatcaacaaaatcaacctaaaaaccatctaaac

SEQ ID NO: 5269 - DNA, 50 bp, Artificial Sequence
  Description of Artificial Sequence: Synthetic probe
aaaatattacatttatttattacttacaaaactataaatcaactttatcc

SEQ ID NO: 5270 - DNA, 50 bp, Artificial Sequence
  Description of Artificial Sequence: Synthetic probe
ccctaatattaaatactattacrtatttttcaccaacctaacaaaacaac

SEQ ID NO: 5271 - DNA, 50 bp, Artificial Sequence
  Description of Artificial Sequence: Synthetic probe
aaactataaatcaactttatccrctatcttactaaattaataaaaaatac

SEQ ID NO: 5272 - DNA, 50 bp, Artificial Sequence
  Description of Artificial Sequence: Synthetic probe
tttagtgtgtagttagatggggatagaagttttaatattgaatgttgtta

SEQ ID NO: 5273 - DNA, 50 bp, Artificial Sequence
  Description of Artificial Sequence: Synthetic probe
aaaaattttatcacaaacttccaccaaaaccaaaaaacaaaatctattcc

SEQ ID NO: 5274 - DNA, 50 bp, Artificial Sequence
  Description of Artificial Sequence: Synthetic probe
tcaaaaaaattatcttaccraaccataatcacataacaaactaaaacaac

SEQ ID NO: 5275 - DNA, 50 bp, Artificial Sequence
  Description of Artificial Sequence: Synthetic probe
ctttctataattctatctactcacttaataaatacracataataaaacrc

SEQ ID NO: 5276 - DNA, 50 bp, Artificial Sequence
  Description of Artificial Sequence: Synthetic probe
tactttctataattctatctactcacttaataaatacracataataaaac

SEQ ID NO: 5277 - DNA, 50 bp, Artificial Sequence
  Description of Artificial Sequence: Synthetic probe
cttctttaaaccttatttaccacatctataaaaaaaataaactaaaccrc

SEQ ID NO: 5278 - DNA, 50 bp, Artificial Sequence
  Description of Artificial Sequence: Synthetic probe
ttaaaaataaacatactttctataattctatctactcacttaataaatac

SEQ ID NO: 5279 - DNA, 50 bp, Artificial Sequence
  Description of Artificial Sequence: Synthetic probe
ttatttgttatatttgtaagaggagtgggttggatygygttttattatgt

SEQ ID NO: 5280 - DNA, 50 bp, Artificial Sequence
  Description of Artificial Sequence: Synthetic probe
tatttaccacatctataaaaaaaataaactaaaccrcrctccaccatacc

SEQ ID NO: 5281 - DNA, 50 bp, Artificial Sequence
  Description of Artificial Sequence: Synthetic probe
ttcactaaataaacaaataaaaccataaaaaacatactcactctcaaatc

SEQ ID NO: 5282 - DNA, 50 bp, Artificial Sequence
  Description of Artificial Sequence: Synthetic probe
taaaaccataaaaaacatactcactctcaaatcrtactcataaaaaaaac

SEQ ID NO: 5283 - DNA, 50 bp, Artificial Sequence
  Description of Artificial Sequence: Synthetic probe
aacrtcactattattacttaaaactctaaaactactactatacaaaatcc

SEQ ID NO: 5284 - DNA, 50 bp, Artificial Sequence
  Description of Artificial Sequence: Synthetic probe
ttattattaatattcttaaccacccaaatattaataaactccaaattaac

SEQ ID NO: 5285 - DNA, 50 bp, Artificial Sequence
  Description of Artificial Sequence: Synthetic probe
ccaaaaacaccaacaacaaaatcaaccractactaaacaatctaccctcc

SEQ ID NO: 5286 - DNA, 50 bp, Artificial Sequence
  Description of Artificial Sequence: Synthetic probe
acctcacccaactaattttctttttaaacacatctaatacctaacaaatc

SEQ ID NO: 5287 - DNA, 50 bp, Artificial Sequence
  Description of Artificial Sequence: Synthetic probe
ttatgttgtggttttgaatttttaagttagtaatttyggtgtatttgagt

SEQ ID NO: 5288 - DNA, 50 bp, Artificial Sequence
  Description of Artificial Sequence: Synthetic probe
catactataatcttaaattttcaaaccaataacctcratatacctaaacc

SEQ ID NO: 5289 - DNA, 50 bp, Artificial Sequence
  Description of Artificial Sequence: Synthetic probe
atttttttggtatttaaggatatttatttaaggaagggggtgagatttat

SEQ ID NO: 5290 - DNA, 50 bp, Artificial Sequence
  Description of Artificial Sequence: Synthetic probe
aaaaaaaaatttaccatactataatcttaaattttcaaaccaataacctc

SEQ ID NO: 5291 - DNA, 50 bp, Artificial Sequence
  Description of Artificial Sequence: Synthetic probe
taattgtyggaatttgaatagtttagaagaagtagatagtaagttaattt

SEQ ID NO: 5292 - DNA, 50 bp, Artificial Sequence
  Description of Artificial Sequence: Synthetic probe
tcatatattttataaaaacaaacaataaacttctccaaactaataatacc

SEQ ID NO: 5293 - DNA, 50 bp, Artificial Sequence
  Description of Artificial Sequence: Synthetic probe
tcataaaatcaaaaaatcaaaaccatcctaactaacacaataaaacccca

SEQ ID NO: 5294 - DNA, 50 bp, Artificial Sequence
  Description of Artificial Sequence: Synthetic probe
tctactaaaataaaacaaaaatcatactataacttaaatttattactaac

SEQ ID NO: 5295 - DNA, 50 bp, Artificial Sequence
  Description of Artificial Sequence: Synthetic probe
aatatatttcaaaactaaaaccctacaatcatcaaccacctcacacctac

SEQ ID NO: 5296 - DNA, 50 bp, Artificial Sequence
  Description of Artificial Sequence: Synthetic probe
atttgttgaggtagaataaaaattatgttgtagtttgggtttgttattga

SEQ ID NO: 5297 - DNA, 50 bp, Artificial Sequence
  Description of Artificial Sequence: Synthetic probe
aaaacactaaaacaaaatcttaacccaaaatccccacccacctaaactcc

SEQ ID NO: 5298 - DNA, 50 bp, Artificial Sequence
  Description of Artificial Sequence: Synthetic probe
aaaaaaaaataaccaaaaaacatataacractcctttaaaactcctcctc

SEQ ID NO: 5299 - DNA, 50 bp, Artificial Sequence
  Description of Artificial Sequence: Synthetic probe
cctcattaaataacracttttaccctaacaaccaataaaaaacraaaatc

SEQ ID NO: 5300 - DNA, 50 bp, Artificial Sequence
  Description of Artificial Sequence: Synthetic probe
actaaaacrtcccaatacrctaacctaaaataataccaaccattctactc

SEQ ID NO: 5301 - DNA, 50 bp, Artificial Sequence
  Description of Artificial Sequence: Synthetic probe
aattggaaygttttagtgygttaatttgaggtggtgttagttattttgtt

SEQ ID NO: 5302 - DNA, 50 bp, Artificial Sequence
  Description of Artificial Sequence: Synthetic probe
tcacattactaaaaatcataaattcrtatcctataaacaaaattcaatcc

SEQ ID NO: 5303 - DNA, 50 bp, Artificial Sequence
  Description of Artificial Sequence: Synthetic probe
acaattaaaaactataaaaacattacattaaccctacaaaacaaatatac

SEQ ID NO: 5304 - DNA, 50 bp, Artificial Sequence
  Description of Artificial Sequence: Synthetic probe
raccraaaacrtactaaaaaccaatataaccraaattaacrtcctcatcc

SEQ ID NO: 5305 - DNA, 50 bp, Artificial Sequence
  Description of Artificial Sequence: Synthetic probe
attaaaataatggtgygagtagagggtgatgttggttttatatttattta

SEQ ID NO: 5306 - DNA, 50 bp, Artificial Sequence
  Description of Artificial Sequence: Synthetic probe
ttaaaacaataatacraacaaaaaataatactaatcctacattcatccac

SEQ ID NO: 5307 - DNA, 50 bp, Artificial Sequence
  Description of Artificial Sequence: Synthetic probe
atatctaaaacaccaaaaataactattaaccaaactctattcctctaaac

SEQ ID NO: 5308 - DNA, 50 bp, Artificial Sequence
  Description of Artificial Sequence: Synthetic probe
tttccrtataaacccraaactaccacttactaactaaaaaaaaccrctac

SEQ ID NO: 5309 - DNA, 50 bp, Artificial Sequence
  Description of Artificial Sequence: Synthetic probe
aaacttaccttattccraaaactaatctcataaaaaacccccraatccrc

SEQ ID NO: 5310 - DNA, 50 bp, Artificial Sequence
  Description of Artificial Sequence: Synthetic probe
atttaaaaaaattattacrtatcttcttttccaaccatacaataaaaatc

SEQ ID NO: 5311 - DNA, 50 bp, Artificial Sequence
  Description of Artificial Sequence: Synthetic probe
ttactatacrccctttatatccrcrataaaaaaactccaatcrtcacacc

SEQ ID NO: 5312 - DNA, 50 bp, Artificial Sequence
  Description of Artificial Sequence: Synthetic probe
aatacactttcaccttacaatatttctaacttcaataaattcactaaaac

SEQ ID NO: 5313 - DNA, 50 bp, Artificial Sequence
  Description of Artificial Sequence: Synthetic probe
agtttggaaattttagttgtattagggaaaggagagattttagaatttta

SEQ ID NO: 5314 - DNA, 50 bp, Artificial Sequence
  Description of Artificial Sequence: Synthetic probe
atcaaccactaattaacaacctttaaacaaaaaatatttaatcaacaaca

SEQ ID NO: 5315 - DNA, 50 bp, Artificial Sequence
  Description of Artificial Sequence: Synthetic probe
tatataaccaattcctatcrcaaataaactttaaactactactaacccac

SEQ ID NO: 5316 - DNA, 50 bp, Artificial Sequence
  Description of Artificial Sequence: Synthetic probe
taacrttaaatatatccccacccactatccaaaactaaactaacraaacc

SEQ ID NO: 5317 - DNA, 50 bp, Artificial Sequence
  Description of Artificial Sequence: Synthetic probe
ttctaaaacacaaaatttcaacttcactccacattttaaaataaaatcac

SEQ ID NO: 5318 - DNA, 50 bp, Artificial Sequence
  Description of Artificial Sequence: Synthetic probe
aactaaaaacracraacraaatccrcracaaaaactcaatccttcraaac

SEQ ID NO: 5319 - DNA, 50 bp, Artificial Sequence
  Description of Artificial Sequence: Synthetic probe
aataaacccrccttcaaaatctaaaaccttccaaattaaatcrtaaaaac

SEQ ID NO: 5320 - DNA, 50 bp, Artificial Sequence
  Description of Artificial Sequence: Synthetic probe
caatctatacrttaaccttaacrtaccctataatccactcccaatactac

SEQ ID NO: 5321 - DNA, 50 bp, Artificial Sequence
  Description of Artificial Sequence: Synthetic probe
taaaaataaatccractccraactctcctaattaacraacrctaaaaaac

SEQ ID NO: 5322 - DNA, 50 bp, Artificial Sequence
  Description of Artificial Sequence: Synthetic probe
ccaatacaaaatcctaaaacccrtatttacaaaaccaaaaccraccttcc

SEQ ID NO: 5323 - DNA, 50 bp, Artificial Sequence
  Description of Artificial Sequence: Synthetic probe
taacatccaactacaatcttcaaactaaactaaatacaaacaccaattcc

SEQ ID NO: 5324 - DNA, 50 bp, Artificial Sequence
  Description of Artificial Sequence: Synthetic probe
aatttaaaataaaaaactaaaaatcrccacctcttaactcttccaaaacc

SEQ ID NO: 5325 - DNA, 50 bp, Artificial Sequence
  Description of Artificial Sequence: Synthetic probe
ttggtatttagttgtagtttttaaattgaattgagtgtaggtattagttt

SEQ ID NO: 5326 - DNA, 50 bp, Artificial Sequence
  Description of Artificial Sequence: Synthetic probe
rtacctcttcactaattctaaattaacccacaaaactataatcaaaattc

SEQ ID NO: 5327 - DNA, 50 bp, Artificial Sequence
  Description of Artificial Sequence: Synthetic probe
aaaccaaacttttccttcatctctatctaaaacccaccaaaaaaccctac

SEQ ID NO: 5328 - DNA, 50 bp, Artificial Sequence
  Description of Artificial Sequence: Synthetic probe
aaaatcacracrtcaaacttcccaaacaatcrtaaacrccatatatttac

SEQ ID NO: 5329 - DNA, 50 bp, Artificial Sequence
  Description of Artificial Sequence: Synthetic probe
taaattcttccttactacacaaacctataatctatcaaaaaacacaacac

SEQ ID NO: 5330 - DNA, 50 bp, Artificial Sequence
  Description of Artificial Sequence: Synthetic probe
ctttactaatctcatactccccatactatatatttacaaaatttatacac

SEQ ID NO: 5331 - DNA, 50 bp, Artificial Sequence
  Description of Artificial Sequence: Synthetic probe
caaaacaacaacaacaacaaatcaaatatttaaaactattaatcaatcac

SEQ ID NO: 5332 - DNA, 50 bp, Artificial Sequence
  Description of Artificial Sequence: Synthetic probe
ttttaggtatatttttgtttagaagttagattggggttaaagagtttgtt

SEQ ID NO: 5333 - DNA, 50 bp, Artificial Sequence
  Description of Artificial Sequence: Synthetic probe
tatatatattcctaatctacracaaccatactaaactcrtataaaaaaac

SEQ ID NO: 5334 - DNA, 50 bp, Artificial Sequence
  Description of Artificial Sequence: Synthetic probe
caaccaaaacccaaaatcaaaatctccaaaacatctctaaaaccrtcccc

SEQ ID NO: 5335 - DNA, 50 bp, Artificial Sequence
  Description of Artificial Sequence: Synthetic probe
cccaaattttctcraataaaaaaaatcctttcactctcttataaaaaaac

SEQ ID NO: 5336 - DNA, 50 bp, Artificial Sequence
  Description of Artificial Sequence: Synthetic probe
ttaattagagtttagagttaggatttttagagtatttttggggtygtttt

SEQ ID NO: 5337 - DNA, 50 bp, Artificial Sequence
  Description of Artificial Sequence: Synthetic probe
tataaacataaaccaccactcccaaccccacttttttcaaactaaaaaac

SEQ ID NO: 5338 - DNA, 50 bp, Artificial Sequence
  Description of Artificial Sequence: Synthetic probe
aaaccctaaatcttaataaaatatttattctacccaactactcctaattc

SEQ ID NO: 5339 - DNA, 50 bp, Artificial Sequence
  Description of Artificial Sequence: Synthetic probe
atatacracttatattctccaactactataaatacaatcccccaaatcac

SEQ ID NO: 5340 - DNA, 50 bp, Artificial Sequence
  Description of Artificial Sequence: Synthetic probe
taaaactctaatctcttaccttaaatcttactaaaaaacacaaatctctc

SEQ ID NO: 5341 - DNA, 50 bp, Artificial Sequence
  Description of Artificial Sequence: Synthetic probe
ataccratcatataccaaacrtccattaacctctaaaccaataaacraac

SEQ ID NO: 5342 - DNA, 50 bp, Artificial Sequence
  Description of Artificial Sequence: Synthetic probe
attttgtagtatggataataataggggattataatttttaaagaggattg

SEQ ID NO: 5343 - DNA, 50 bp, Artificial Sequence
  Description of Artificial Sequence: Synthetic probe
ttacctaaactcaaaaattcraaatcatcaaaactacataataaaacccc

SEQ ID NO: 5344 - DNA, 50 bp, Artificial Sequence
  Description of Artificial Sequence: Synthetic probe
tactataaatcataccrtaaacatatcctctattatctaacctaaaatac

SEQ ID NO: 5345 - DNA, 50 bp, Artificial Sequence
  Description of Artificial Sequence: Synthetic probe
atttaaaaccaactcaaactcrtcaccataaccaacataataaaaccccc

SEQ ID NO: 5346 - DNA, 50 bp, Artificial Sequence
  Description of Artificial Sequence: Synthetic probe
tcactaacrcttaaaaacctacaaaaaacaatactaacracaatacccrc

SEQ ID NO: 5347 - DNA, 50 bp, Artificial Sequence
  Description of Artificial Sequence: Synthetic probe
atcctaaaacraaaaaatcaacraaaaaaacccratactccraaacaaac

SEQ ID NO: 5348 - DNA, 50 bp, Artificial Sequence
  Description of Artificial Sequence: Synthetic probe
aacraacccaaacactcraacctacraaatcctaaaacraaaaaatcaac

SEQ ID NO: 5349 - DNA, 50 bp, Artificial Sequence
  Description of Artificial Sequence: Synthetic probe
craaactaaacaaccrcraataaaaacctaacraacttaataacccctac

SEQ ID NO: 5350 - DNA, 50 bp, Artificial Sequence
  Description of Artificial Sequence: Synthetic probe
raataaaaacctaacraacttaataacccctacrccctaactaaaaaacc

SEQ ID NO: 5351 - DNA, 50 bp, Artificial Sequence
  Description of Artificial Sequence: Synthetic probe
tagttgaggaaggtgaagygatatgtttaaggttaatagttagagaatta

SEQ ID NO: 5352 - DNA, 50 bp, Artificial Sequence
  Description of Artificial Sequence: Synthetic probe
aaaataaaatcaaacaaattcctaaacttatataactacaaaaaactctc

SEQ ID NO: 5353 - DNA, 50 bp, Artificial Sequence
  Description of Artificial Sequence: Synthetic probe
crtctatttttattcacaattatttacttaaaacttaacaccaaatctac

SEQ ID NO: 5354 - DNA, 50 bp, Artificial Sequence
  Description of Artificial Sequence: Synthetic probe
taatcrtatccccttcctaatccactaaaattaaccccttcaaaaaaaac

SEQ ID NO: 5355 - DNA, 50 bp, Artificial Sequence
  Description of Artificial Sequence: Synthetic probe
attagttttaaggtatgatatttaggttttatttagggggtttaaaggga

SEQ ID NO: 5356 - DNA, 50 bp, Artificial Sequence
  Description of Artificial Sequence: Synthetic probe
accctataaaaaataaataaaacctcacataaccaacctaaattccaaac

SEQ ID NO: 5357 - DNA, 50 bp, Artificial Sequence
  Description of Artificial Sequence: Synthetic probe
aattacaaatcccaactcatcccctctccttattcccaaaacctttatac

SEQ ID NO: 5358 - DNA, 50 bp, Artificial Sequence
  Description of Artificial Sequence: Synthetic probe
tccatacctcccraataaaaaaacrctatctaccraacttccrtaataac

SEQ ID NO: 5359 - DNA, 50 bp, Artificial Sequence
  Description of Artificial Sequence: Synthetic probe
tccttattcccaaaacctttatacrccaccacraaaactcrataaataac

SEQ ID NO: 5360 - DNA, 50 bp, Artificial Sequence
  Description of Artificial Sequence: Synthetic probe
actaaatctatttctatatataacaaacaattaaacaacataaaccraac

SEQ ID NO: 5361 - DNA, 50 bp, Artificial Sequence
  Description of Artificial Sequence: Synthetic probe
taaaactaaatctatttctatatataacaaacaattaaacaacataaacc

SEQ ID NO: 5362 - DNA, 50 bp, Artificial Sequence
  Description of Artificial Sequence: Synthetic probe
aacacatcctcaaaacraaataacctcaacaacaactataacctcctatc

SEQ ID NO: 5363 - DNA, 50 bp, Artificial Sequence
  Description of Artificial Sequence: Synthetic probe
ctttctaaatcccctcraaaaactacaacctctcrttacaactcaaatcc

SEQ ID NO: 5364 - DNA, 50 bp, Artificial Sequence
  Description of Artificial Sequence: Synthetic probe
aaaaatcacaactactactaaaaccaccccrccttaaaaatatacctacc

SEQ ID NO: 5365 - DNA, 50 bp, Artificial Sequence
  Description of Artificial Sequence: Synthetic probe
actaaaaccaccccrccttaaaaatatacctaccraacctaaattacaac

SEQ ID NO: 5366 - DNA, 50 bp, Artificial Sequence
  Description of Artificial Sequence: Synthetic probe
tttttaataattgggggttttttgaattttttygggagattgtagttttt

SEQ ID NO: 5367 - DNA, 50 bp, Artificial Sequence
  Description of Artificial Sequence: Synthetic probe
tttcaataactaaaaactttctaaatcccctcraaaaactacaacctctc

SEQ ID NO: 5368 - DNA, 50 bp, Artificial Sequence
  Description of Artificial Sequence: Synthetic probe
aaatataaataaccttcccattctatcccctcaattccratacctcaacc

SEQ ID NO: 5369 - DNA, 50 bp, Artificial Sequence
  Description of Artificial Sequence: Synthetic probe
aaaacaaacrtctataaaaccracaataactacrattccracractaaac

SEQ ID NO: 5370 - DNA, 50 bp, Artificial Sequence
  Description of Artificial Sequence: Synthetic probe
attcttataaacctcattatatatcccaaaaacaattaatatcrtcatac

SEQ ID NO: 5371 - DNA, 50 bp, Artificial Sequence
  Description of Artificial Sequence: Synthetic probe
cataaaaacrttaaatcccctcatcrccrttctaaaacccrtaactattc

SEQ ID NO: 5372 - DNA, 50 bp, Artificial Sequence
  Description of Artificial Sequence: Synthetic probe
ctttccctcaatctccaaaaaccaatacraaactttaactccrattaaac

SEQ ID NO: 5373 - DNA, 50 bp, Artificial Sequence
  Description of Artificial Sequence: Synthetic probe
ctcaccccaataaactttctcaattactacatatattaatctattttcac

SEQ ID NO: 5374 - DNA, 50 bp, Artificial Sequence
  Description of Artificial Sequence: Synthetic probe
rctaaaccttattcttccccractacaactccttatatccctaaatttac

SEQ ID NO: 5375 - DNA, 50 bp, Artificial Sequence
  Description of Artificial Sequence: Synthetic probe
cataaacaatatctaacaaatatatatctacacaaaattatcaataacac

SEQ ID NO: 5376 - DNA, 50 bp, Artificial Sequence
  Description of Artificial Sequence: Synthetic probe
ataaacaatatctaacaaatatatatctacacaaaattatcaataacaca

SEQ ID NO: 5377 - DNA, 50 bp, Artificial Sequence
  Description of Artificial Sequence: Synthetic probe
ccaaaaacaaaacaaacctaaaaatactcaaacaaaaacaaacatatacc

SEQ ID NO: 5378 - DNA, 50 bp, Artificial Sequence
  Description of Artificial Sequence: Synthetic probe
caaaaacaaaacaaacctaaaaatactcaaacaaaaacaaacatatacca

SEQ ID NO: 5379 - DNA, 50 bp, Artificial Sequence
  Description of Artificial Sequence: Synthetic probe
ttatgagtagtgtttggtaggtgtgtgtttatatagaattattagtgata

SEQ ID NO: 5380 - DNA, 50 bp, Artificial Sequence
  Description of Artificial Sequence: Synthetic probe
aacrtaataccttctaattctaacctctaaataccccccacaactcaatc

SEQ ID NO: 5381 - DNA, 50 bp, Artificial Sequence
  Description of Artificial Sequence: Synthetic probe
aaacaaaatctaaaccataaaaataaacctaatcctactattcctaatcc

SEQ ID NO: 5382 - DNA, 50 bp, Artificial Sequence
  Description of Artificial Sequence: Synthetic probe
aggaattttatttattagtagtagttttttggggtgtaaaaagggtagtg

SEQ ID NO: 5383 - DNA, 50 bp, Artificial Sequence
  Description of Artificial Sequence: Synthetic probe
aaagtaaagtttgggttatggagatgagtttagttttgttgtttttgatt

SEQ ID NO: 5384 - DNA, 50 bp, Artificial Sequence
  Description of Artificial Sequence: Synthetic probe
tcaatttcccrcrctaaaactttttcaataataaacraacaaaactccrc

SEQ ID NO: 5385 - DNA, 50 bp, Artificial Sequence
  Description of Artificial Sequence: Synthetic probe
atcaaaaacraaaccttaaaacraaaacraaactttccatacaatacccc

SEQ ID NO: 5386 - DNA, 50 bp, Artificial Sequence
  Description of Artificial Sequence: Synthetic probe
attctataaatttaaatactatatatatcrcraaaaccctaaaaaaatcc

SEQ ID NO: 5387 - DNA, 50 bp, Artificial Sequence
  Description of Artificial Sequence: Synthetic probe
ttacactaaaatcatacccaatccaactcaccaacraaactataatctcc

SEQ ID NO: 5388 - DNA, 50 bp, Artificial Sequence
  Description of Artificial Sequence: Synthetic probe
tctactacctaaatcaataatatataaaaatactctccttacttcccctc

SEQ ID NO: 5389 - DNA, 50 bp, Artificial Sequence
  Description of Artificial Sequence: Synthetic probe
aatttttatggtattgataaagattatatggttttygggggagatttttg

SEQ ID NO: 5390 - DNA, 50 bp, Artificial Sequence
  Description of Artificial Sequence: Synthetic probe
accctcataatactaacaaaaatcacataactctcraaaaaaattcctac

SEQ ID NO: 5391 - DNA, 50 bp, Artificial Sequence
  Description of Artificial Sequence: Synthetic probe
tgaataggtttttagtggagttaataatttaggtgtttttagaggtaggt

SEQ ID NO: 5392 - DNA, 50 bp, Artificial Sequence
  Description of Artificial Sequence: Synthetic probe
aaacaaattctcaataaaattaataacccaaatacctccaaaaacaaatc

SEQ ID NO: 5393 - DNA, 50 bp, Artificial Sequence
  Description of Artificial Sequence: Synthetic probe
ataaaaataaaactaataaataaaaaccaaactaaccataccactatacc

SEQ ID NO: 5394 - DNA, 50 bp, Artificial Sequence
  Description of Artificial Sequence: Synthetic probe
rtcaaaactcaaataatctttccacctcaacttcctaaaactacaaacac

SEQ ID NO: 5395 - DNA, 50 bp, Artificial Sequence
  Description of Artificial Sequence: Synthetic probe
ctataaaaataaaactaaatcttccraaccttacraaaaacrcrccccac

SEQ ID NO: 5396 - DNA, 50 bp, Artificial Sequence
  Description of Artificial Sequence: Synthetic probe
ttacratcaaaatactacaaaacrtaactccccacaataaatacrtttcc

SEQ ID NO: 5397 - DNA, 50 bp, Artificial Sequence
  Description of Artificial Sequence: Synthetic probe
aatggttgagtttttygttagygtaggattagtttgtttttgggattttt

SEQ ID NO: 5398 - DNA, 50 bp, Artificial Sequence
  Description of Artificial Sequence: Synthetic probe
ataactaaacttctcrccaacrcaaaatcaacctattcctaaaactttcc

SEQ ID NO: 5399 - DNA, 50 bp, Artificial Sequence
  Description of Artificial Sequence: Synthetic probe
ctcrtaattaaccctaaattccraaccccaatttcattaaataaacratc

SEQ ID NO: 5400 - DNA, 50 bp, Artificial Sequence
  Description of Artificial Sequence: Synthetic probe
ctccrcaacaaaacacraaatttacattccccaaaaaacraccaaaaaac

SEQ ID NO: 5401 - DNA, 50 bp, Artificial Sequence
  Description of Artificial Sequence: Synthetic probe
aaataaaaaatatacaaaaacactcaaccctaccctcctctcttctccac

SEQ ID NO: 5402 - DNA, 50 bp, Artificial Sequence
  Description of Artificial Sequence: Synthetic probe
aaacttttaaatttcatcratactctttaccaatattaaatctaaaaacc

SEQ ID NO: 5403 - DNA, 50 bp, Artificial Sequence
  Description of Artificial Sequence: Synthetic probe
atacctaacctttacrtacttaaatatatcctaaacttttaaatttcatc

SEQ ID NO: 5404 - DNA, 50 bp, Artificial Sequence
  Description of Artificial Sequence: Synthetic probe
cccaaactaaaatactacactattaacctacccaaatacctaacctttac

SEQ ID NO: 5405 - DNA, 50 bp, Artificial Sequence
  Description of Artificial Sequence: Synthetic probe
cttctaaacaaaaactaacaacaccacctccacaacacctacacratctc

SEQ ID NO: 5406 - DNA, 50 bp, Artificial Sequence
  Description of Artificial Sequence: Synthetic probe
ggtagagtttattgttggtaaaatgaggagtttttagtttattggattgg

SEQ ID NO: 5407 - DNA, 50 bp, Artificial Sequence
  Description of Artificial Sequence: Synthetic probe
tataactctacacctttaacataatatactaacaattcracctacttttc

SEQ ID NO: 5408 - DNA, 50 bp, Artificial Sequence
  Description of Artificial Sequence: Synthetic probe
tccraattaaaattaatattaaaactaacraaataactaaaatactctcc

SEQ ID NO: 5409 - DNA, 50 bp, Artificial Sequence
  Description of Artificial Sequence: Synthetic probe
tctaaacaatactataactctacacctttaacataatatactaacaattc

SEQ ID NO: 5410 - DNA, 50 bp, Artificial Sequence
  Description of Artificial Sequence: Synthetic probe
cactacccaaaaaaccrtcttcatacrattatactaaaaacacaccaaac

SEQ ID NO: 5411 - DNA, 50 bp, Artificial Sequence
  Description of Artificial Sequence: Synthetic probe
aaaaccrtcttcatacrattatactaaaaacacaccaaacraataacrcc

SEQ ID NO: 5412 - DNA, 50 bp, Artificial Sequence
  Description of Artificial Sequence: Synthetic probe
atattattacaaaaaaactcraaaaactctcrataaaaacrataaaactc

SEQ ID NO: 5413 - DNA, 50 bp, Artificial Sequence
  Description of Artificial Sequence: Synthetic probe
craaaaactctcrataaaaacrataaaactcratcaaaacctcctcctcc

SEQ ID NO: 5414 - DNA, 50 bp, Artificial Sequence
  Description of Artificial Sequence: Synthetic probe
tactattctaatacttctaccctttccaaccatctttaacccatctatac

SEQ ID NO: 5415 - DNA, 50 bp, Artificial Sequence
  Description of Artificial Sequence: Synthetic probe
catttcactctataaaactctctcccctcacctaatacaaacaactcacc

SEQ ID NO: 5416 - DNA, 50 bp, Artificial Sequence
  Description of Artificial Sequence: Synthetic probe
taaatcacttaaacactatccccctccctaaaaaactctattcaacactc

SEQ ID NO: 5417 - DNA, 50 bp, Artificial Sequence
  Description of Artificial Sequence: Synthetic probe
ttgtatttgtttagatattagatttgaagttagatagattagtgtaagga

SEQ ID NO: 5418 - DNA, 50 bp, Artificial Sequence
  Description of Artificial Sequence: Synthetic probe
aataaattaaaacctaaacatcaaaaaacccaaattataactaactctac

SEQ ID NO: 5419 - DNA, 50 bp, Artificial Sequence
  Description of Artificial Sequence: Synthetic probe
gaatgagttgggatttagatattaggagatttagattgtagttggttttg

SEQ ID NO: 5420 - DNA, 50 bp, Artificial Sequence
  Description of Artificial Sequence: Synthetic probe
aacctaataaaaaacaaacaaaacaaccaaatacaaaaaacaatcttcac

SEQ ID NO: 5421 - DNA, 50 bp, Artificial Sequence
  Description of Artificial Sequence: Synthetic probe
tacttacaactacccccttttacacrtaattctctaatccccaaatttcc

SEQ ID NO: 5422 - DNA, 50 bp, Artificial Sequence
  Description of Artificial Sequence: Synthetic probe
actacacaactctcaaaaatctcctaaataacctatacccactcctatac

SEQ ID NO: 5423 - DNA, 50 bp, Artificial Sequence
  Description of Artificial Sequence: Synthetic probe
craaaacaaaaataacccaaaacaaaaacataacraccactcraccaaac

SEQ ID NO: 5424 - DNA, 50 bp, Artificial Sequence
  Description of Artificial Sequence: Synthetic probe
ctaacctaaaaacctctaatactaaacctcttcraactcctaacaacatc

SEQ ID NO: 5425 - DNA, 50 bp, Artificial Sequence
  Description of Artificial Sequence: Synthetic probe
actaaaactcataatattccttttcctaatccctacaaatctaattctcc

SEQ ID NO: 5426 - DNA, 50 bp, Artificial Sequence
  Description of Artificial Sequence: Synthetic probe
ccaaataaaaaacaataacaaaacraacctaaacctcraaaataaatcac

SEQ ID NO: 5427 - DNA, 50 bp, Artificial Sequence
  Description of Artificial Sequence: Synthetic probe
caaaacraacctaaacctcraaaataaatcacraaaactccaaccccctc

SEQ ID NO: 5428 - DNA, 50 bp, Artificial Sequence
  Description of Artificial Sequence: Synthetic probe
caacaaccaattttcctaaaaaacaatacccaccttccctctaaaaccrc

SEQ ID NO: 5429 - DNA, 50 bp, Artificial Sequence
  Description of Artificial Sequence: Synthetic probe
tccaacaaccaattttcctaaaaaacaatacccaccttccctctaaaacc

SEQ ID NO: 5430 - DNA, 50 bp, Artificial Sequence
  Description of Artificial Sequence: Synthetic probe
ataaaaaaaaccaatcccatctcctccacrtaatatccaaaatttcccac

SEQ ID NO: 5431 - DNA, 50 bp, Artificial Sequence
  Description of Artificial Sequence: Synthetic probe
crtaaataaaacaataaaacctcaaaaaacraaactccaccctcacctcc

SEQ ID NO: 5432 - DNA, 50 bp, Artificial Sequence
  Description of Artificial Sequence: Synthetic probe
ctccactcacrttctaaacacctatatctcaactaaatataaccrcatcc

SEQ ID NO: 5433 - DNA, 50 bp, Artificial Sequence
  Description of Artificial Sequence: Synthetic probe
tttagtgttygttgtaggaattttyggtatatgtggtataaattgtgttt

SEQ ID NO: 5434 - DNA, 50 bp, Artificial Sequence
  Description of Artificial Sequence: Synthetic probe
gttttagttaaatgtagtygtattygggatatagtttgtgttatatgtgt

SEQ ID NO: 5435 - DNA, 50 bp, Artificial Sequence
  Description of Artificial Sequence: Synthetic probe
tctcaactaaatataaccrcatccraaacacaatttataccacatatacc

SEQ ID NO: 5436 - DNA, 50 bp, Artificial Sequence
  Description of Artificial Sequence: Synthetic probe
gtatagttggtagatggttaggtagttttagtgttygttgtaggaatttt

SEQ ID NO: 5437 - DNA, 50 bp, Artificial Sequence
  Description of Artificial Sequence: Synthetic probe
aaattcctacaacraacactaaaactacctaaccatctaccaactatacc

SEQ ID NO: 5438 - DNA, 50 bp, Artificial Sequence
  Description of Artificial Sequence: Synthetic probe
tctaccaactataccrcccctataacccaaataaataaaaatatacctac

SEQ ID NO: 5439 - DNA, 50 bp, Artificial Sequence
  Description of Artificial Sequence: Synthetic probe
ttacttatacaaaaaacaatctcctcraaacccatcactaacraaaaaac

SEQ ID NO: 5440 - DNA, 50 bp, Artificial Sequence
  Description of Artificial Sequence: Synthetic probe
tcttccrtttacttatacaaaaaacaatctcctcraaacccatcactaac

SEQ ID NO: 5441 - DNA, 50 bp, Artificial Sequence
  Description of Artificial Sequence: Synthetic probe
taacaacracactaaatcttccrtttacttatacaaaaaacaatctcctc

SEQ ID NO: 5442 - DNA, 50 bp, Artificial Sequence
  Description of Artificial Sequence: Synthetic probe
aacccaaacaacacaaaacattcccractaacaacracactaaatcttcc

SEQ ID NO: 5443 - DNA, 50 bp, Artificial Sequence
  Description of Artificial Sequence: Synthetic probe
ttttttygttagtgatgggtttygaggagattgttttttgtataagtaaa

SEQ ID NO: 5444 - DNA, 50 bp, Artificial Sequence
  Description of Artificial Sequence: Synthetic probe
atatatacactcraaaacccaaacaacacaaaacattcccractaacaac

SEQ ID NO: 5445 - DNA, 50 bp, Artificial Sequence
  Description of Artificial Sequence: Synthetic probe
aaacctcraaaaaattaccccctacacaaacaaacraaaaacccaatacc

SEQ ID NO: 5446 - DNA, 50 bp, Artificial Sequence
  Description of Artificial Sequence: Synthetic probe
ataactcrcaatatatacactcraaaacccaaacaacacaaaacattccc

SEQ ID NO: 5447 - DNA, 50 bp, Artificial Sequence
  Description of Artificial Sequence: Synthetic probe
ggagattgttttttgtataagtaaayggaagatttagtgtygttgttagt

SEQ ID NO: 5448 - DNA, 50 bp, Artificial Sequence
  Description of Artificial Sequence: Synthetic probe
agtagttygtagtgtgtatattygagggtttaggtagtatagaatatttt

SEQ ID NO: 5449 - DNA, 50 bp, Artificial Sequence
  Description of Artificial Sequence: Synthetic probe
acttcaataccaaacraacaatcaaaaaataactcrcaatatatacactc

SEQ ID NO: 5450 - DNA, 50 bp, Artificial Sequence
  Description of Artificial Sequence: Synthetic probe
tgttgtttgggttttygagtgtatatattgygagttattttttgattgtt

SEQ ID NO: 5451 - DNA, 50 bp, Artificial Sequence
  Description of Artificial Sequence: Synthetic probe
actacctaaaccctcraatatacacactacraactactttctaactaccc

SEQ ID NO: 5452 - DNA, 50 bp, Artificial Sequence
  Description of Artificial Sequence: Synthetic probe
aatatacacactacraactactttctaactacccrcctaacactaaaacc

SEQ ID NO: 5453 - DNA, 50 bp, Artificial Sequence
  Description of Artificial Sequence: Synthetic probe
atataaacatacataaaaaatatccraaaaaatatataccacaatataac

SEQ ID NO: 5454 - DNA, 50 bp, Artificial Sequence
  Description of Artificial Sequence: Synthetic probe
aaaccactacctaaaatatccactcrttacattataatatatatcctccc

SEQ ID NO: 5455 - DNA, 50 bp, Artificial Sequence
  Description of Artificial Sequence: Synthetic probe
aacaataacataaaacctccaatatccrtcaactacrcctaaaaaaaaac

SEQ ID NO: 5456 - DNA, 50 bp, Artificial Sequence
  Description of Artificial Sequence: Synthetic probe
tatgaatgagaagaggtaaaatgtttagtatagaaatgygggagtttttt

SEQ ID NO: 5457 - DNA, 50 bp, Artificial Sequence
  Description of Artificial Sequence: Synthetic probe
ggtattagtgttgttagtaatagtatggagtttttagtgttygttagtta

SEQ ID NO: 5458 - DNA, 50 bp, Artificial Sequence
  Description of Artificial Sequence: Synthetic probe
tttctctaaataccaatactaccaacaataacataaaacctccaatatcc

SEQ ID NO: 5459 - DNA, 50 bp, Artificial Sequence
  Description of Artificial Sequence: Synthetic probe
aaataaaaaacttacaaaccctactctaccaaacraccacaaacaattcc

SEQ ID NO: 5460 - DNA, 50 bp, Artificial Sequence
  Description of Artificial Sequence: Synthetic probe
taatcaccctcctatctactatcctaacaaaaaccatactaatactaacc

SEQ ID NO: 5461 - DNA, 50 bp, Artificial Sequence
  Description of Artificial Sequence: Synthetic probe
aaaacctacacccatttcattctccattacaaaatcrctactcaaaaaac

SEQ ID NO: 5462 - DNA, 50 bp, Artificial Sequence
  Description of Artificial Sequence: Synthetic probe
cctacacccatttcattctccattacaaaatcrctactcaaaaaacrtcc

SEQ ID NO: 5463 - DNA, 50 bp, Artificial Sequence
  Description of Artificial Sequence: Synthetic probe
tcattctccattacaaaatcrctactcaaaaaacrtccrcaaataataac

SEQ ID NO: 5464 - DNA, 50 bp, Artificial Sequence
  Description of Artificial Sequence: Synthetic probe
aactttaacccaaaaaacaacaacrttaaactaataaacaattcccaatc

SEQ ID NO: 5465 - DNA, 50 bp, Artificial Sequence
  Description of Artificial Sequence: Synthetic probe
aaatttgtygaatagggatttgtagttygttgagtttagtaattttgaat

SEQ ID NO: 5466 - DNA, 50 bp, Artificial Sequence
  Description of Artificial Sequence: Synthetic probe
aacttatcraacaaaaacttacaattcrctaaacctaacaaccttaaacc

SEQ ID NO: 5467 - DNA, 50 bp, Artificial Sequence
  Description of Artificial Sequence: Synthetic probe
aaaactaaaaacctttaaaaaaaaacttatcraacaaaaacttacaattc

SEQ ID NO: 5468 - DNA, 50 bp, Artificial Sequence
  Description of Artificial Sequence: Synthetic probe
crttaaactaataaacaattcccaatcrattcaaaattactaaactcaac

SEQ ID NO: 5469 - DNA, 50 bp, Artificial Sequence
  Description of Artificial Sequence: Synthetic probe
tcccaatcrattcaaaattactaaactcaacraactacaaatccctattc

SEQ ID NO: 5470 - DNA, 50 bp, Artificial Sequence
  Description of Artificial Sequence: Synthetic probe
gatttttagaagaattatgaggaattggggatttttaggaagaaatttgt

SEQ ID NO: 5471 - DNA, 50 bp, Artificial Sequence
  Description of Artificial Sequence: Synthetic probe
tttttagtyggtttaaggttgttaggtttagygaattgtaagtttttgtt

SEQ ID NO: 5472 - DNA, 50 bp, Artificial Sequence
  Description of Artificial Sequence: Synthetic probe
aaacacatttaccacaacctaaaaataactaataacaaaaaaatcctcac

SEQ ID NO: 5473 - DNA, 50 bp, Artificial Sequence
  Description of Artificial Sequence: Synthetic probe
gttattattaggtaaggtatttgaatttttatygtagagagtgttgtggt

SEQ ID NO: 5474 - DNA, 50 bp, Artificial Sequence
  Description of Artificial Sequence: Synthetic probe
aaaacccctaaattaaaaacttcctaaaaaaataaaccactccacatatc

SEQ ID NO: 5475 - DNA, 50 bp, Artificial Sequence
  Description of Artificial Sequence: Synthetic probe
acatcttctctcctaaccttaaacacttaaaattaaaaataacttcctac

SEQ ID NO: 5476 - DNA, 50 bp, Artificial Sequence
  Description of Artificial Sequence: Synthetic probe
atcctcccctttcccacctctaactatatcaatcactaatatcctaaatc

SEQ ID NO: 5477 - DNA, 50 bp, Artificial Sequence
  Description of Artificial Sequence: Synthetic probe
agttatttttaattttaagtgtttaaggttaggagagaagatgttttagg

SEQ ID NO: 5478 - DNA, 50 bp, Artificial Sequence
  Description of Artificial Sequence: Synthetic probe
aattacaaacaaaaaatataaaactacctctcttctatcacactctaacc

SEQ ID NO: 5479 - DNA, 50 bp, Artificial Sequence
  Description of Artificial Sequence: Synthetic probe
atacccaattactaatactaacctctaaaattaacacctccaaactaaac

SEQ ID NO: 5480 - DNA, 50 bp, Artificial Sequence
  Description of Artificial Sequence: Synthetic probe
aaatactaactccaaaaaccaacatcaacaactaaacacaaaaaaaaacc

SEQ ID NO: 5481 - DNA, 50 bp, Artificial Sequence
  Description of Artificial Sequence: Synthetic probe
caactcttaaaaactaaaataactaaaaaccccaccaaaatccccaaaac

SEQ ID NO: 5482 - DNA, 50 bp, Artificial Sequence
  Description of Artificial Sequence: Synthetic probe
aatctcaccctacrcctatttactatattaaccccaatcctctctctttc

SEQ ID NO: 5483 - DNA, 50 bp, Artificial Sequence
  Description of Artificial Sequence: Synthetic probe
ataaaaacctaacraacttaataacccctacrccctaactaaaaaaccrc

SEQ ID NO: 5484 - DNA, 50 bp, Artificial Sequence
  Description of Artificial Sequence: Synthetic probe
aatatactcaatcccacaaaacaatacattaaaaaatacctaaaataacc

SEQ ID NO: 5485 - DNA, 50 bp, Artificial Sequence
  Description of Artificial Sequence: Synthetic probe
aatgaagttatttgttgtttagtgtttagtttataggttagagyggtgat

SEQ ID NO: 5486 - DNA, 50 bp, Artificial Sequence
  Description of Artificial Sequence: Synthetic probe
ataaaattatttactacttaatatctaactcacaaaccaaaacrataacc

SEQ ID NO: 5487 - DNA, 50 bp, Artificial Sequence
  Description of Artificial Sequence: Synthetic probe
tctataaaaatactaaaaacataatactaactaaaacaaacacratcacc

SEQ ID NO: 5488 - DNA, 50 bp, Artificial Sequence
  Description of Artificial Sequence: Synthetic probe
tagttgtaatgaagttatttgttgtttagtgtttagtttataggttagag

SEQ ID NO: 5489 - DNA, 50 bp, Artificial Sequence
  Description of Artificial Sequence: Synthetic probe
aactaaacactaaacaacaaataacttcattacaactaaaaaattactac

SEQ ID NO: 5490 - DNA, 50 bp, Artificial Sequence
  Description of Artificial Sequence: Synthetic probe
atcaattttccttataataaaatctcccaatcccctatacttctcccttc

SEQ ID NO: 5491 - DNA, 50 bp, Artificial Sequence
  Description of Artificial Sequence: Synthetic probe
aataataaaacaacaaaatataaacaaccccaatcttaaccctaaaaaac

SEQ ID NO: 5492 - DNA, 50 bp, Artificial Sequence
  Description of Artificial Sequence: Synthetic probe
aaaaatcttatcacaaaaaaaccttctttcaactaaaaaaattatctatc

SEQ ID NO: 5493 - DNA, 50 bp, Artificial Sequence
  Description of Artificial Sequence: Synthetic probe
ctctattattttaaattttcttttacttataacaaaacccaatacttacc

SEQ ID NO: 5494 - DNA, 50 bp, Artificial Sequence
  Description of Artificial Sequence: Synthetic probe
aaaaacaaatataatcaccactccaacttataacataaacactaaacaac

SEQ ID NO: 5495 - DNA, 50 bp, Artificial Sequence
  Description of Artificial Sequence: Synthetic probe
ccttatactttttcctttataacrcttatcraattataataaaattattc

SEQ ID NO: 5496 - DNA, 50 bp, Artificial Sequence
  Description of Artificial Sequence: Synthetic probe
ctatataaatatccrtctacccattaaacatctccactaaaaaactcacc

SEQ ID NO: 5497 - DNA, 50 bp, Artificial Sequence
  Description of Artificial Sequence: Synthetic probe
aatatccaataaacaaacraatactcacataaaaaattcataataaattc

SEQ ID NO: 5498 - DNA, 50 bp, Artificial Sequence
  Description of Artificial Sequence: Synthetic probe
ctattcctctaaacrtctctaaccaaacctcaaatactttcctctaaccc

SEQ ID NO: 5499 - DNA, 50 bp, Artificial Sequence
  Description of Artificial Sequence: Synthetic probe
agatgtttaatgggtagayggatatttatatagagagtttatggtagatt

SEQ ID NO: 5500 - DNA, 50 bp, Artificial Sequence
  Description of Artificial Sequence: Synthetic probe
aataaaaccaaacataataaaaatctctcatcccaactctttaaaaaatc

SEQ ID NO: 5501 - DNA, 50 bp, Artificial Sequence
  Description of Artificial Sequence: Synthetic probe
aaatacraatccaaattaatacacaaaacacttcctcattcctctcttac

SEQ ID NO: 5502 - DNA, 50 bp, Artificial Sequence
  Description of Artificial Sequence: Synthetic probe
ataaattaaataaatcataactcacccattcaataaactactatacaacc

SEQ ID NO: 5503 - DNA, 50 bp, Artificial Sequence
  Description of Artificial Sequence: Synthetic probe
ctactatcccaaccaaataaataaatataataaaacctccttaccaaacc

SEQ ID NO: 5504 - DNA, 50 bp, Artificial Sequence
  Description of Artificial Sequence: Synthetic probe
aattactaatttcctacaacatctactcctcrttctaatcaaaaaaaccc

SEQ ID NO: 5505 - DNA, 50 bp, Artificial Sequence
  Description of Artificial Sequence: Synthetic probe
aaactttactctacataatcaaacaccaataaatttttataaaaaaaccc

SEQ ID NO: 5506 - DNA, 50 bp, Artificial Sequence
  Description of Artificial Sequence: Synthetic probe
ccctaaaaataaaaaactttctatttatttctcctctacacrtaacaacc

SEQ ID NO: 5507 - DNA, 50 bp, Artificial Sequence
  Description of Artificial Sequence: Synthetic probe
gaagtatttgtygtagatgtygtaygagtgtgatttgatattaygatgta

SEQ ID NO: 5508 - DNA, 50 bp, Artificial Sequence
  Description of Artificial Sequence: Synthetic probe
aagtatttgttgtagatgttgtatgagtgtgatttgatattatgatgtat

SEQ ID NO: 5509 - DNA, 50 bp, Artificial Sequence
  Description of Artificial Sequence: Synthetic probe
aaacacttaccrcaaataccrcacraatataacttaacaccacratacac

SEQ ID NO: 5510 - DNA, 50 bp, Artificial Sequence
  Description of Artificial Sequence: Synthetic probe
aacacttaccacaaataccacacaaatataacttaacaccacaatacaca

SEQ ID NO: 5511 - DNA, 50 bp, Artificial Sequence
  Description of Artificial Sequence: Synthetic probe
ygttgtggtaagtagtttaattatagtagtaattttaatygttatatgaa

SEQ ID NO: 5512 - DNA, 50 bp, Artificial Sequence
  Description of Artificial Sequence: Synthetic probe
gttgtggtaagtagtttaattatagtagtaattttaattgttatatgaat

SEQ ID NO: 5513 - DNA, 50 bp, Artificial Sequence
  Description of Artificial Sequence: Synthetic probe
aacatttttccttaactacrcctctcttcttaaaccttaaaaaaatcccc

SEQ ID NO: 5514 - DNA, 50 bp, Artificial Sequence
  Description of Artificial Sequence: Synthetic probe
gttttygtttataygtttygtttgaatttaggttttagattggagagata

SEQ ID NO: 5515 - DNA, 50 bp, Artificial Sequence
  Description of Artificial Sequence: Synthetic probe
tatcrtaccattataaaaataatcataccctatacccaaaaaacaaacac

SEQ ID NO: 5516 - DNA, 50 bp, Artificial Sequence
  Description of Artificial Sequence: Synthetic probe
atttcaaataaataaacraaaacaaacaaaacttctatctcaaccctacc

SEQ ID NO: 5517 - DNA, 50 bp, Artificial Sequence
  Description of Artificial Sequence: Synthetic probe
ttgtygtgttattatgggggtggttatattttgtatttaggaaataggta

SEQ ID NO: 5518 - DNA, 50 bp, Artificial Sequence
  Description of Artificial Sequence: Synthetic probe
cacaactaacccttaaacaatataaaattaaaaatactaacccccacrtc

SEQ ID NO: 5519 - DNA, 50 bp, Artificial Sequence
  Description of Artificial Sequence: Synthetic probe
ttaaacaaacatcaacctaactccttttttaaaaatcaaaaattatacrc

SEQ ID NO: 5520 - DNA, 50 bp, Artificial Sequence
  Description of Artificial Sequence: Synthetic probe
taaacaatataaaattaaaaatactaacccccacrtcrtcaaaaatccrc

SEQ ID NO: 5521 - DNA, 50 bp, Artificial Sequence
  Description of Artificial Sequence: Synthetic probe
tcttattcaaaaatcaactctctataacrtctacaaatatcctaccctac

SEQ ID NO: 5522 - DNA, 50 bp, Artificial Sequence
  Description of Artificial Sequence: Synthetic probe
tctcttctcacctttacaattttctaaaatccttattcctttcctaacac

SEQ ID NO: 5523 - DNA, 50 bp, Artificial Sequence
  Description of Artificial Sequence: Synthetic probe
ttgtttttagtggttttggatagggatttttataatataaagtttgggtg

SEQ ID NO: 5524 - DNA, 50 bp, Artificial Sequence
  Description of Artificial Sequence: Synthetic probe
tactctcaataactttaaacaaaaattctcataacataaaatctaaatac

SEQ ID NO: 5525 - DNA, 50 bp, Artificial Sequence
  Description of Artificial Sequence: Synthetic probe
acrctataaaataaacactactaatacccatattttactaataaaaatac

SEQ ID NO: 5526 - DNA, 50 bp, Artificial Sequence
  Description of Artificial Sequence: Synthetic probe
tattataaaaatccctatccaaaaccactaaaaacaatctctttacctcc

SEQ ID NO: 5527 - DNA, 50 bp, Artificial Sequence
  Description of Artificial Sequence: Synthetic probe
aaygttgtgaggtgggtattgttgatatttatgttttattaatgaagata

SEQ ID NO: 5528 - DNA, 50 bp, Artificial Sequence
  Description of Artificial Sequence: Synthetic probe
aatataaaaataaaaactacccaatctcactacaaacaactaaaaaaatc

SEQ ID NO: 5529 - DNA, 50 bp, Artificial Sequence
  Description of Artificial Sequence: Synthetic probe
gggttgtttagttttattgtagatagttaaaggaatygtagtattaggyg

SEQ ID NO: 5530 - DNA, 50 bp, Artificial Sequence
  Description of Artificial Sequence: Synthetic probe
aactacccaatctcactacaaacaactaaaaaaatcrcaacaccaaacrc

SEQ ID NO: 5531 - DNA, 50 bp, Artificial Sequence
  Description of Artificial Sequence: Synthetic probe
aaactacaatataaaacratatttctacraaaaactatttctaaaattcc

SEQ ID NO: 5532 - DNA, 50 bp, Artificial Sequence
  Description of Artificial Sequence: Synthetic probe
ttaacctcactaatacaaaaaatattaatttactaataaaaattcacctc

SEQ ID NO: 5533 - DNA, 50 bp, Artificial Sequence
  Description of Artificial Sequence: Synthetic probe
ataagagataaatagatggtagttatgggaaagttagatatttagtaatt

SEQ ID NO: 5534 - DNA, 50 bp, Artificial Sequence
  Description of Artificial Sequence: Synthetic probe
ataaatctatttacctaatatttaaataacccattcttccccacttttac

SEQ ID NO: 5535 - DNA, 50 bp, Artificial Sequence
  Description of Artificial Sequence: Synthetic probe
aattcccctttcactattcacacttccttcatcrtcacaatttaaccaac

SEQ ID NO: 5536 - DNA, 50 bp, Artificial Sequence
  Description of Artificial Sequence: Synthetic probe
taaataaaataaatatatataaccatacttaaaatcataaaccctaaacc

SEQ ID NO: 5537 - DNA, 50 bp, Artificial Sequence
  Description of Artificial Sequence: Synthetic probe
gtaaagttagaaagagtaygatttggattttagtttaattgatagggatt

SEQ ID NO: 5538 - DNA, 50 bp, Artificial Sequence
  Description of Artificial Sequence: Synthetic probe
taaaaccaaaaaaaacacratttaaatctcaactcaactaataaaaatcc

SEQ ID NO: 5539 - DNA, 50 bp, Artificial Sequence
  Description of Artificial Sequence: Synthetic probe
aaaatcrtaacrcctacctctcaatattattaaaattaaatatattaacc

SEQ ID NO: 5540 - DNA, 50 bp, Artificial Sequence
  Description of Artificial Sequence: Synthetic probe
atctaaatttaaaactattaaactaaaaaacccaaactaattcttaatac

SEQ ID NO: 5541 - DNA, 50 bp, Artificial Sequence
  Description of Artificial Sequence: Synthetic probe
aaatacraaaaaactcaaatctaccrtataaaatatcccaaacaataaac

SEQ ID NO: 5542 - DNA, 50 bp, Artificial Sequence
  Description of Artificial Sequence: Synthetic probe
aatttgaatttgggattgttagattgagaagtttaagttaatttttgata

SEQ ID NO: 5543 - DNA, 50 bp, Artificial Sequence
  Description of Artificial Sequence: Synthetic probe
aaaaacccaaactaattcttaatacrctcactacctaaaacatttcacac

SEQ ID NO: 5544 - DNA, 50 bp, Artificial Sequence
  Description of Artificial Sequence: Synthetic probe
aaaactacattttccttttaatctcaaatacraaaaaactcaaatctacc

SEQ ID NO: 5545 - DNA, 50 bp, Artificial Sequence
  Description of Artificial Sequence: Synthetic probe
taatacrctcactacctaaaacatttcacacrataaatctaaactttctc

SEQ ID NO: 5546 - DNA, 50 bp, Artificial Sequence
  Description of Artificial Sequence: Synthetic probe
ttccttctactatctattaaaaactacattttccttttaatctcaaatac

SEQ ID NO: 5547 - DNA, 50 bp, Artificial Sequence
  Description of Artificial Sequence: Synthetic probe
aaacctttaactccacaatccacaactcattttaaaatatactaatcaac

SEQ ID NO: 5548 - DNA, 50 bp, Artificial Sequence
  Description of Artificial Sequence: Synthetic probe
caaattataataatctttaactatcaaactaaaacttcrcattttctcac

SEQ ID NO: 5549 - DNA, 50 bp, Artificial Sequence
  Description of Artificial Sequence: Synthetic probe
aacacttaaatccaaattataataatctttaactatcaaactaaaacttc

SEQ ID NO: 5550 - DNA, 50 bp, Artificial Sequence
  Description of Artificial Sequence: Synthetic probe
ttattttccctccactattttcaaaccctaactatttacaaactacatac

SEQ ID NO: 5551 - DNA, 50 bp, Artificial Sequence
  Description of Artificial Sequence: Synthetic probe
aaacaaccctaataccaacctaaaaaatataaatttctcctccaaaccca

SEQ ID NO: 5552 - DNA, 50 bp, Artificial Sequence
  Description of Artificial Sequence: Synthetic probe
ataaaaataaaaccccaaccracaaatcctaatactcrcrccacctaaac

SEQ ID NO: 5553 - DNA, 50 bp, Artificial Sequence
  Description of Artificial Sequence: Synthetic probe
aatttcccrcrctaaaactttttcaataataaacraacaaaactccrcrc

SEQ ID NO: 5554 - DNA, 50 bp, Artificial Sequence
  Description of Artificial Sequence: Synthetic probe
tgtaaaagtaggattttaatygatagattttagtgttygygttatttggg

SEQ ID NO: 5555 - DNA, 50 bp, Artificial Sequence
  Description of Artificial Sequence: Synthetic probe
caacattactttcaacctccttcaacaaatttcctaaacatctaatcctc

SEQ ID NO: 5556 - DNA, 50 bp, Artificial Sequence
  Description of Artificial Sequence: Synthetic probe
aacraaattaaattcaaatctaatcacataacctaacctaaaatactcrc

SEQ ID NO: 5557 - DNA, 50 bp, Artificial Sequence
  Description of Artificial Sequence: Synthetic probe
acacaactctattatataaacatcrtacactcatacttacatacraaaac

SEQ ID NO: 5558 - DNA, 50 bp, Artificial Sequence
  Description of Artificial Sequence: Synthetic probe
ggtttaygtagtttagaaggaggagttatttattatttatagttagggta

SEQ ID NO: 5559 - DNA, 50 bp, Artificial Sequence
  Description of Artificial Sequence: Synthetic probe
ttttctcataaccrtttctctattcttcctctttacrttactctacraac

SEQ ID NO: 5560 - DNA, 50 bp, Artificial Sequence
  Description of Artificial Sequence: Synthetic probe
aattaaaaaactaatcraaattacrcraacataaatcaacrcatccctac

SEQ ID NO: 5561 - DNA, 50 bp, Artificial Sequence
  Description of Artificial Sequence: Synthetic probe
tcaaaaacractccttccracttctccaaaaaaaccaaacactaaaatac

SEQ ID NO: 5562 - DNA, 50 bp, Artificial Sequence
  Description of Artificial Sequence: Synthetic probe
craccccaaccaaacaaccaaatcctcctcaaaatcaaactatatttaac

SEQ ID NO: 5563 - DNA, 50 bp, Artificial Sequence
  Description of Artificial Sequence: Synthetic probe
rtaacttctacatattaaactccaattccctatttacaattatacacttc

SEQ ID NO: 5564 - DNA, 50 bp, Artificial Sequence
  Description of Artificial Sequence: Synthetic probe
ttatcaattatacaacracactacccrcaacaaccctataacacaaactc

SEQ ID NO: 5565 - DNA, 50 bp, Artificial Sequence
  Description of Artificial Sequence: Synthetic probe
atatttatatcaacaaaaataaaaaatctaataaaaacattcccaccctc

SEQ ID NO: 5566 - DNA, 50 bp, Artificial Sequence
  Description of Artificial Sequence: Synthetic probe
raactacttaaaataactattccccacctccatacratctaacctctatc

SEQ ID NO: 5567 - DNA, 50 bp, Artificial Sequence
  Description of Artificial Sequence: Synthetic probe
gttagtagttgtagatggagaatttttggttttaggggttatagtagatt

SEQ ID NO: 5568 - DNA, 50 bp, Artificial Sequence
  Description of Artificial Sequence: Synthetic probe
aaacraacaaaaaaaacacrctcttataaataactacaaattaaaaaacc

SEQ ID NO: 5569 - DNA, 50 bp, Artificial Sequence
  Description of Artificial Sequence: Synthetic probe
aaaattcttataaacataacattcctaaaaacttctctaactacaacctc

SEQ ID NO: 5570 - DNA, 50 bp, Artificial Sequence
  Description of Artificial Sequence: Synthetic probe
rcrataaaaaaacaaaacctcatcraacctaaccctaattaatcratacc

SEQ ID NO: 5571 - DNA, 50 bp, Artificial Sequence
  Description of Artificial Sequence: Synthetic probe
ctctccatacraattcaacataactaccrcaaaccaaaaacacacacaac

SEQ ID NO: 5572 - DNA, 50 bp, Artificial Sequence
  Description of Artificial Sequence: Synthetic probe
ttcccaaaaaaccctactaaacaccactaatatatcctctaacaaaaaac

SEQ ID NO: 5573 - DNA, 50 bp, Artificial Sequence
  Description of Artificial Sequence: Synthetic probe
caaattaaaaacacaataatccaaatatcctaacttaactaatatccccc

SEQ ID NO: 5574 - DNA, 50 bp, Artificial Sequence
  Description of Artificial Sequence: Synthetic probe
ttttttaggaggttttgttgaatattattgatatgttttttggtaggaaa

SEQ ID NO: 5575 - DNA, 50 bp, Artificial Sequence
  Description of Artificial Sequence: Synthetic probe
tatcctcctcacaaaattccccaaaatacattatatttactcccttacca

SEQ ID NO: 5576 - DNA, 50 bp, Artificial Sequence
  Description of Artificial Sequence: Synthetic probe
ttgtttaaaatagtattaaggaatgaattgaatagtgggagaattaggtt

SEQ ID NO: 5577 - DNA, 50 bp, Artificial Sequence
  Description of Artificial Sequence: Synthetic probe
attctctaaatccaaaatcttcctaatacatcrcctcaaccataaacaac

SEQ ID NO: 5578 - DNA, 50 bp, Artificial Sequence
  Description of Artificial Sequence: Synthetic probe
cactcttcaaaaaacctaaactactactcacraatattaaaaaactccrc

SEQ ID NO: 5579 - DNA, 50 bp, Artificial Sequence
  Description of Artificial Sequence: Synthetic probe
ccataataacttccaatataacaaatctacaaaaacactctacacrtctc

SEQ ID NO: 5580 - DNA, 50 bp, Artificial Sequence
  Description of Artificial Sequence: Synthetic probe
attagttttatggttaagaatttattggaattgtatggaataggaatagt

SEQ ID NO: 5581 - DNA, 50 bp, Artificial Sequence
  Description of Artificial Sequence: Synthetic probe
atttataccccraatataacccccatcaaaatctacaataacaaccraac

SEQ ID NO: 5582 - DNA, 50 bp, Artificial Sequence
  Description of Artificial Sequence: Synthetic probe
aatttatatttygagtgtggtttttattaaagtttgtagtgatagtygag

SEQ ID NO: 5583 - DNA, 50 bp, Artificial Sequence
  Description of Artificial Sequence: Synthetic probe
atctaaaactcactatatccaatcaaaacctacataaactaaacccctac

SEQ ID NO: 5584 - DNA, 50 bp, Artificial Sequence
  Description of Artificial Sequence: Synthetic probe
aaaaaacaaactaaaacaaaattaacttatctctttaccttctaaaaaac

SEQ ID NO: 5585 - DNA, 50 bp, Artificial Sequence
  Description of Artificial Sequence: Synthetic probe
cctcccrattataaatatatctctccaaaaaacrctatatcccattaaac

SEQ ID NO: 5586 - DNA, 50 bp, Artificial Sequence
  Description of Artificial Sequence: Synthetic probe
cccctccccrcaaaaaattaccttttccaaaaacracaaaaatactacrc

SEQ ID NO: 5587 - DNA, 50 bp, Artificial Sequence
  Description of Artificial Sequence: Synthetic probe
tactccaacccttaccaaaaaactattcattttctctaactaacaaaaac

SEQ ID NO: 5588 - DNA, 50 bp, Artificial Sequence
  Description of Artificial Sequence: Synthetic probe
taaaataaaaaacaatataaaaactcctcccaccaatatttttaactttc

SEQ ID NO: 5589 - DNA, 50 bp, Artificial Sequence
  Description of Artificial Sequence: Synthetic probe
aacrttccaacractaaaaaacctactaacaaacaaccccaaaatcactc

SEQ ID NO: 5590 - DNA, 50 bp, Artificial Sequence
  Description of Artificial Sequence: Synthetic probe
aataataataatatacaaaaaaaaactactatccccacttatccactcac

SEQ ID NO: 5591 - DNA, 50 bp, Artificial Sequence
  Description of Artificial Sequence: Synthetic probe
atttcctttacctcrtttcrtttcctcttctatacrtataatataaaccc

SEQ ID NO: 5592 - DNA, 50 bp, Artificial Sequence
  Description of Artificial Sequence: Synthetic probe
aaaaaaaaacaaaaacaatctctaacaacctcaaaaaaacrtttcaaacc

SEQ ID NO: 5593 - DNA, 50 bp, Artificial Sequence
  Description of Artificial Sequence: Synthetic probe
raaaaaccccaaaaaaactactttcrtaccraccaaacaaaaaatttatc

SEQ ID NO: 5594 - DNA, 50 bp, Artificial Sequence
  Description of Artificial Sequence: Synthetic probe
ttaaaactacctaaaactaaaaccaaatacraaatccacatctacratcc

SEQ ID NO: 5595 - DNA, 50 bp, Artificial Sequence
  Description of Artificial Sequence: Synthetic probe
tcccattaaatatcraatttccaaaaaaaccaatcaatatcrtcrcratc

SEQ ID NO: 5596 - DNA, 50 bp, Artificial Sequence
  Description of Artificial Sequence: Synthetic probe
accccraacraaataaaaacccctaaactcccaaaataaaaactaactcc

SEQ ID NO: 5597 - DNA, 50 bp, Artificial Sequence
  Description of Artificial Sequence: Synthetic probe
aactaaatataacrtatctaatttacatactctaaaatccactaaatacc

SEQ ID NO: 5598 - DNA, 50 bp, Artificial Sequence
  Description of Artificial Sequence: Synthetic probe
tacttacaattccaactaatttcaattctttaatatctaataacaaaaac

SEQ ID NO: 5599 - DNA, 50 bp, Artificial Sequence
  Description of Artificial Sequence: Synthetic probe
craaataactcaaaaacttttaaatataacaaacctaaaattactatctc

SEQ ID NO: 5600 - DNA, 50 bp, Artificial Sequence
  Description of Artificial Sequence: Synthetic probe
ttgaggtttagagaggtaagagattagtttttaagttagtaattggtagt

SEQ ID NO: 5601 - DNA, 50 bp, Artificial Sequence
  Description of Artificial Sequence: Synthetic probe
craaacaacaaccctaaatctattacattcaaaaacctctaaaccactcc

SEQ ID NO: 5602 - DNA, 50 bp, Artificial Sequence
  Description of Artificial Sequence: Synthetic probe
tattacattcaaaaacctctaaaccactccrcataacttcccattcattc

SEQ ID NO: 5603 - DNA, 50 bp, Artificial Sequence
  Description of Artificial Sequence: Synthetic probe
tacccacraacaacacaacaaacctttctcaacataaaaaaacaaaaacc

SEQ ID NO: 5604 - DNA, 50 bp, Artificial Sequence
  Description of Artificial Sequence: Synthetic probe
ttgtttayggatagtataataggttttttttaatatgagggagtagagat

SEQ ID NO: 5605 - DNA, 50 bp, Artificial Sequence
  Description of Artificial Sequence: Synthetic probe
tttagaaagttattttttattgggaatagyggtttgagattttgattgta

SEQ ID NO: 5606 - DNA, 50 bp, Artificial Sequence
  Description of Artificial Sequence: Synthetic probe
tcaaaaaactattccttattaaaaataacracttaaaattttaactacac

SEQ ID NO: 5607 - DNA, 50 bp, Artificial Sequence
  Description of Artificial Sequence: Synthetic probe
taatataaaaatattcatttaattccctctcratattttaaaaaacracc

SEQ ID NO: 5608 - DNA, 50 bp, Artificial Sequence
  Description of Artificial Sequence: Synthetic probe
caaaaatacattaaattcttaatataaaaatattcatttaattccctctc

SEQ ID NO: 5609 - DNA, 50 bp, Artificial Sequence
  Description of Artificial Sequence: Synthetic probe
ttcttaaatttaaaattaaatactccaatacraccrttttccaaaatacc

SEQ ID NO: 5610 - DNA, 50 bp, Artificial Sequence
  Description of Artificial Sequence: Synthetic probe
aaattctatattttaaaaacccactttaactacaataaaaccaaattatc

SEQ ID NO: 5611 - DNA, 50 bp, Artificial Sequence
  Description of Artificial Sequence: Synthetic probe
tggattttatgttttaagggtttattttggttgtagtggagttagattat

SEQ ID NO: 5612 - DNA, 50 bp, Artificial Sequence
  Description of Artificial Sequence: Synthetic probe
caaccaaaataaacccttaaaacataaaatccatccctcccaactctacc

SEQ ID NO: 5613 - DNA, 50 bp, Artificial Sequence
  Description of Artificial Sequence: Synthetic probe
caaaataaacccttaaaacataaaatccatccctcccaactctaccracc

SEQ ID NO: 5614 - DNA, 50 bp, Artificial Sequence
  Description of Artificial Sequence: Synthetic probe
cacrttctacacacctataaatcttaaaatataatcccttactcaacrtc

SEQ ID NO: 5615 - DNA, 50 bp, Artificial Sequence
  Description of Artificial Sequence: Synthetic probe
ataaatcttaaaatataatcccttactcaacrtcratccrccctactatc

SEQ ID NO: 5616 - DNA, 50 bp, Artificial Sequence
  Description of Artificial Sequence: Synthetic probe
ccraccaaaacttacraaaccraaaatatcctaaatctcraaaaaaccrc

SEQ ID NO: 5617 - DNA, 50 bp, Artificial Sequence
  Description of Artificial Sequence: Synthetic probe
accraaatcctaaataacttaacctcraatcrtccraaacttctcratac

SEQ ID NO: 5618 - DNA, 50 bp, Artificial Sequence
  Description of Artificial Sequence: Synthetic probe
caccccaaaaacaatatccacrcaaccraaatcctaaataacttaacctc

SEQ ID NO: 5619 - DNA, 50 bp, Artificial Sequence
  Description of Artificial Sequence: Synthetic probe
aaaccatccaaaaccccractacrtaaacactacctctaaaatatatatc

SEQ ID NO: 5620 - DNA, 50 bp, Artificial Sequence
  Description of Artificial Sequence: Synthetic probe
caaaaccccractacrtaaacactacctctaaaatatatatcraataacc

SEQ ID NO: 5621 - DNA, 50 bp, Artificial Sequence
  Description of Artificial Sequence: Synthetic probe
cccractacrtaaacactacctctaaaatatatatcraataaccrtaacc

SEQ ID NO: 5622 - DNA, 50 bp, Artificial Sequence
  Description of Artificial Sequence: Synthetic probe
cactacctctaaaatatatatcraataaccrtaaccrataaaataatcrc

SEQ ID NO: 5623 - DNA, 50 bp, Artificial Sequence
  Description of Artificial Sequence: Synthetic probe
ctacctctaaaatatatatcraataaccrtaaccrataaaataatcrcrc

SEQ ID NO: 5624 - DNA, 50 bp, Artificial Sequence
  Description of Artificial Sequence: Synthetic probe
atctacaataatatcaatattttataaaaaactcacccaatataattatc

SEQ ID NO: 5625 - DNA, 50 bp, Artificial Sequence
  Description of Artificial Sequence: Synthetic probe
aaaactaaaatttaaacccatatatctaattcaaatcaatactctaaacc

SEQ ID NO: 5626 - DNA, 50 bp, Artificial Sequence
  Description of Artificial Sequence: Synthetic probe
taatatataaacaaaccaaaattatttcttcaaatcaaaaacttatctac

SEQ ID NO: 5627 - DNA, 50 bp, Artificial Sequence
  Description of Artificial Sequence: Synthetic probe
agggaaatgttgtgttagttttttaggttttaagattaagygtygttttt

SEQ ID NO: 5628 - DNA, 50 bp, Artificial Sequence
  Description of Artificial Sequence: Synthetic probe
aaaaaatattataccaaccttccaaattctaaaactaaacrtcrcccttc

SEQ ID NO: 5629 - DNA, 50 bp, Artificial Sequence
  Description of Artificial Sequence: Synthetic probe
aattttaaaaaaatattataccaaccttccaaattctaaaactaaacrtc

SEQ ID NO: 5630 - DNA, 50 bp, Artificial Sequence
  Description of Artificial Sequence: Synthetic probe
tagttttagggaaatgttgtgttagttttttaggttttaagattaagygt

SEQ ID NO: 5631 - DNA, 50 bp, Artificial Sequence
  Description of Artificial Sequence: Synthetic probe
atcttatttccttatctataaaaaataattaattctccatttcataaccc

SEQ ID NO: 5632 - DNA, 50 bp, Artificial Sequence
  Description of Artificial Sequence: Synthetic probe
taatatacccatacrtctaccaataatccacctaaaaataatctactatc

SEQ ID NO: 5633 - DNA, 50 bp, Artificial Sequence
  Description of Artificial Sequence: Synthetic probe
taataaaaacaaaaactacrcataaaactataacctactttctatctttc

SEQ ID NO: 5634 - DNA, 50 bp, Artificial Sequence
  Description of Artificial Sequence: Synthetic probe
tttaggtggattattggtagaygtatgggtatattaagaaggtatttatt

SEQ ID NO: 5635 - DNA, 50 bp, Artificial Sequence
  Description of Artificial Sequence: Synthetic probe
tacaaaaatacaaataatacaacacataaacaaaaacaaacttaactacc

SEQ ID NO: 5636 - DNA, 50 bp, Artificial Sequence
  Description of Artificial Sequence: Synthetic probe
aatacaacacataaacaaaaacaaacttaactaccrtcttaattttaacc

SEQ ID NO: 5637 - DNA, 50 bp, Artificial Sequence
  Description of Artificial Sequence: Synthetic probe
tttaaaccttctctttatcttcttactactataatatctatcttaaaaac

SEQ ID NO: 5638 - DNA, 50 bp, Artificial Sequence
  Description of Artificial Sequence: Synthetic probe
ttaatcttaaatcttcaaaatactccaaaaccccrtaaatctacaaatac

SEQ ID NO: 5639 - DNA, 50 bp, Artificial Sequence
  Description of Artificial Sequence: Synthetic probe
actaaaatacrtatatccttctaacttctacccrtaccctatacaaacac

SEQ ID NO: 5640 - DNA, 50 bp, Artificial Sequence
  Description of Artificial Sequence: Synthetic probe
ccrccaaatacraaaactaactccraacaactaaaaatacaaccccaacc

SEQ ID NO: 5641 - DNA, 50 bp, Artificial Sequence
  Description of Artificial Sequence: Synthetic probe
rtttactattaaaaaaattccaacrcraaaaactaaacccraaactttac

SEQ ID NO: 5642 - DNA, 50 bp, Artificial Sequence
  Description of Artificial Sequence: Synthetic probe
acaacaacaacaaaaaccacaacccacattacttaaaaactcraacrtac

SEQ ID NO: 5643 - DNA, 50 bp, Artificial Sequence
  Description of Artificial Sequence: Synthetic probe
tccccrtatctctccaatctaaaacctaaattcaaacraaacrtataaac

SEQ ID NO: 5644 - DNA, 50 bp, Artificial Sequence
  Description of Artificial Sequence: Synthetic probe
aaacraaaaaaatctataaaatcctaaattcaacactctaccctactacc

SEQ ID NO: 5645 - DNA, 50 bp, Artificial Sequence
  Description of Artificial Sequence: Synthetic probe
aatcaaaaaactcaaacactttacattcctcataaaacaccccaacaaca

SEQ ID NO: 5646 - DNA, 50 bp, Artificial Sequence
  Description of Artificial Sequence: Synthetic probe
ctcccttccccaccccaaatatcctattcatcaaaataatcacataaaca

SEQ ID NO: 5647 - DNA, 50 bp, Artificial Sequence
  Description of Artificial Sequence: Synthetic probe
aaaacraccttaaataacatcaccctattcaacaaactccccaaaaaaac

SEQ ID NO: 5648 - DNA, 50 bp, Artificial Sequence
  Description of Artificial Sequence: Synthetic probe
ctctttaatataccattcataccttaaacctcactttcacctcaacccac

SEQ ID NO: 5649 - DNA, 50 bp, Artificial Sequence
  Description of Artificial Sequence: Synthetic probe
gattgttagatttgttgtgttgagttagaatgtatttgatttgtttaggt

SEQ ID NO: 5650 - DNA, 50 bp, Artificial Sequence
  Description of Artificial Sequence: Synthetic probe
actattaaacctactatattaaattaaaatacacttaacctactcaaacc

SEQ ID NO: 5651 - DNA, 50 bp, Artificial Sequence
  Description of Artificial Sequence: Synthetic probe
ctctaacttaaaattaaccctattctttaaccctctattcataataaatc

SEQ ID NO: 5652 - DNA, 50 bp, Artificial Sequence
  Description of Artificial Sequence: Synthetic probe
agttattttggttttaaaggaygtttttttgagtatgtttttygayggat

SEQ ID NO: 5653 - DNA, 50 bp, Artificial Sequence
  Description of Artificial Sequence: Synthetic probe
ratccaaaaactcacaaatctcactaaaaaaaaatctaacrtaaattcac

SEQ ID NO: 5654 - DNA, 50 bp, Artificial Sequence
  Description of Artificial Sequence: Synthetic probe
aacttcrtatttaactttaatcttaaacaaccttaaaatctctccrtacc

SEQ ID NO: 5655 - DNA, 50 bp, Artificial Sequence
  Description of Artificial Sequence: Synthetic probe
aaaacaaacacaatccactctaccctccttaaaatacraaaacttcrtcc

SEQ ID NO: 5656 - DNA, 50 bp, Artificial Sequence
  Description of Artificial Sequence: Synthetic probe
crccccttaaaaaactattctaaacctttactcctaatatcrtataaaac

SEQ ID NO: 5657 - DNA, 50 bp, Artificial Sequence
  Description of Artificial Sequence: Synthetic probe
crtaaaccctaaaaattctcaataaaaacctccaacttaaaatatccccc

SEQ ID NO: 5658 - DNA, 50 bp, Artificial Sequence
  Description of Artificial Sequence: Synthetic probe
aaaaaaactaaaacaaacacaaactatcctctacaactccatataaactc

SEQ ID NO: 5659 - DNA, 50 bp, Artificial Sequence
  Description of Artificial Sequence: Synthetic probe
tggagaaattaaggtagatataggttgttttttgtaattttatgtagatt

SEQ ID NO: 5660 - DNA, 50 bp, Artificial Sequence
  Description of Artificial Sequence: Synthetic probe
atcattctcaaacaaaaactaaactcctccttttctcacraattaaaaac

SEQ ID NO: 5661 - DNA, 50 bp, Artificial Sequence
  Description of Artificial Sequence: Synthetic probe
racacaaaaatataaaacrccrtattaaaaatactaaacraccccracrc

SEQ ID NO: 5662 - DNA, 50 bp, Artificial Sequence
  Description of Artificial Sequence: Synthetic probe
cacccataaaatctctctccratcrcaaaaaacaaactaactcctaaccc

SEQ ID NO: 5663 - DNA, 50 bp, Artificial Sequence
  Description of Artificial Sequence: Synthetic probe
ataaacaaaaatctctaattttcctaaacaaaaaaccctacaaccttcca

SEQ ID NO: 5664 - DNA, 50 bp, Artificial Sequence
  Description of Artificial Sequence: Synthetic probe
aaaataataaccaaacaaaaaaactcctcacttcccaataaaaacaacca

SEQ ID NO: 5665 - DNA, 50 bp, Artificial Sequence
  Description of Artificial Sequence: Synthetic probe
aaacaactaaccaaacaaaaaaactcctcacttcccaataaaaacaacca

SEQ ID NO: 5666 - DNA, 50 bp, Artificial Sequence
  Description of Artificial Sequence: Synthetic probe
aaacaaaataactaccaaacaaaaaaactcctcacttctcaaacaaaaca

SEQ ID NO: 5667 - DNA, 50 bp, Artificial Sequence
  Description of Artificial Sequence: Synthetic probe
aacattatataactacataccttttcctaatttctcctcaaaacaactac

SEQ ID NO: 5668 - DNA, 50 bp, Artificial Sequence
  Description of Artificial Sequence: Synthetic probe
aaaaaaaaacatacctaaattcaaaaatacrtacaaacttaaataactcc

SEQ ID NO: 5669 - DNA, 50 bp, Artificial Sequence
  Description of Artificial Sequence: Synthetic probe
catcaaacccrtctaaaaatcaaaatactccraaaactccctaataaccc

SEQ ID NO: 5670 - DNA, 50 bp, Artificial Sequence
  Description of Artificial Sequence: Synthetic probe
aaaaaaacattacatttaattcaaatttcaaccaaactacraaataccac

SEQ ID NO: 5671 - DNA, 50 bp, Artificial Sequence
  Description of Artificial Sequence: Synthetic probe
crataattcacrctctcracraaactataccraaaattacctctacttcc

SEQ ID NO: 5672 - DNA, 50 bp, Artificial Sequence
  Description of Artificial Sequence: Synthetic probe
aaaaaacatattctaatttctatctataactcrtttctaattctaccacc

SEQ ID NO: 5673 - DNA, 50 bp, Artificial Sequence
  Description of Artificial Sequence: Synthetic probe
ccratccccaatataataatcctaatccaaacactaactatccttttctc

SEQ ID NO: 5674 - DNA, 50 bp, Artificial Sequence
  Description of Artificial Sequence: Synthetic probe
ttaaaaaactaatcraaattacrcraacataaatcaacrcatccctacrc

SEQ ID NO: 5675 - DNA, 50 bp, Artificial Sequence
  Description of Artificial Sequence: Synthetic probe
attaaaaaaccattacaataacccacataaatatcaataaaaccctactc

SEQ ID NO: 5676 - DNA, 50 bp, Artificial Sequence
  Description of Artificial Sequence: Synthetic probe
tcttcttttaaaataatttttcctatttattcttcactatacattccccc

SEQ ID NO: 5677 - DNA, 50 bp, Artificial Sequence
  Description of Artificial Sequence: Synthetic probe
crcaaacaaactcraaatcttcaaataattctcacttaaaatatatactc

SEQ ID NO: 5678 - DNA, 50 bp, Artificial Sequence
  Description of Artificial Sequence: Synthetic probe
ataggygtatttgaaaagttaagtaggttaaagtatttgtgtaaatggtt

SEQ ID NO: 5679 - DNA, 50 bp, Artificial Sequence
  Description of Artificial Sequence: Synthetic probe
caaacrcacctaaaaaattaaacaaaccaaaacatttatataaataaccc

SEQ ID NO: 5680 - DNA, 50 bp, Artificial Sequence
  Description of Artificial Sequence: Synthetic probe
acaaaacattactttatttatatccaaatacacctcctaccccctacctc

SEQ ID NO: 5681 - DNA, 50 bp, Artificial Sequence
  Description of Artificial Sequence: Synthetic probe
caaataaaccctaaaacctaaactctactcccttctctaaactaactccc

SEQ ID NO: 5682 - DNA, 50 bp, Artificial Sequence
  Description of Artificial Sequence: Synthetic probe
tatatttatccrtaaaataaactaaatactacctccaactactactcttc

SEQ ID NO: 5683 - DNA, 50 bp, Artificial Sequence
  Description of Artificial Sequence: Synthetic probe
atttatataaaaactacraacttttacattacaacctccctactttaccc

SEQ ID NO: 5684 - DNA, 50 bp, Artificial Sequence
  Description of Artificial Sequence: Synthetic probe
crcaccccaattatctaaccctcatcaatttatacaaaaaaaccraactc

SEQ ID NO: 5685 - DNA, 50 bp, Artificial Sequence
  Description of Artificial Sequence: Synthetic probe
aaaaaaacraacaaaataactaacaccacctcaaattaacrcactaaaac

SEQ ID NO: 5686 - DNA, 50 bp, Artificial Sequence
  Description of Artificial Sequence: Synthetic probe
crtttaaccattcactcaatattttctaacaaccttctaaaataaatacc

SEQ ID NO: 5687 - DNA, 50 bp, Artificial Sequence
  Description of Artificial Sequence: Synthetic probe
aacctaaaattattttacacaccttcrtttaaaaattttacaactaaccc

SEQ ID NO: 5688 - DNA, 50 bp, Artificial Sequence
  Description of Artificial Sequence: Synthetic probe
tggtttggaattattttgtatattttygtttggaggttttatagttgatt

SEQ ID NO: 5689 - DNA, 50 bp, Artificial Sequence
  Description of Artificial Sequence: Synthetic probe
acraaactaacrcctcctaataactacaataaaaaacrcacttattttcc

SEQ ID NO: 5690 - DNA, 50 bp, Artificial Sequence
  Description of Artificial Sequence: Synthetic probe
attattctctccataattctcttattttaataaacaatatcttaaaccac

SEQ ID NO: 5691 - DNA, 50 bp, Artificial Sequence
  Description of Artificial Sequence: Synthetic probe
acacraacaaaaatcaacccctccttcaattaaaaaaccaaaaacaaaac

SEQ ID NO: 5692 - DNA, 50 bp, Artificial Sequence
  Description of Artificial Sequence: Synthetic probe
tatctttatacctatctaaaacatctacacaaacttaacccaaattcaac

SEQ ID NO: 5693 - DNA, 50 bp, Artificial Sequence
  Description of Artificial Sequence: Synthetic probe
aatcaaactccaaccaaaaaatataactaccatcaccaccaaaatactcc

SEQ ID NO: 5694 - DNA, 50 bp, Artificial Sequence
  Description of Artificial Sequence: Synthetic probe
tggttaagttttagttaggagatatggttgttattattattaaggtgttt

SEQ ID NO: 5695 - DNA, 50 bp, Artificial Sequence
  Description of Artificial Sequence: Synthetic probe
cctcttatatactaaaaaccaccttttttctccccaataactaaaaacac

SEQ ID NO: 5696 - DNA, 50 bp, Artificial Sequence; identical to SEQ ID NO: 5695
  Description of Artificial Sequence: Synthetic probe

SEQ ID NO: 5697 - DNA, 50 bp, Artificial Sequence
  Description of Artificial Sequence: Synthetic probe
ctcttatatactaaaaaccaccttttttctccccaataactaaaaacaca

SEQ ID NO: 5698 - DNA, 50 bp, Artificial Sequence
  Description of Artificial Sequence: Synthetic probe
aaaaaatatttcaacaaaaatcratactcaatccatttctcacctttatc

SEQ ID NO: 5699 - DNA, 50 bp, Artificial Sequence
  Description of Artificial Sequence: Synthetic probe
gtagataatttaatttaggagatttgataagaatgttaagggagtgatta

SEQ ID NO: 5700 - DNA, 50 bp, Artificial Sequence
  Description of Artificial Sequence: Synthetic probe
acccaaatataaaacaaacaatccccaaaatatcaaaacaaataaaaaac

SEQ ID NO: 5701 - DNA, 50 bp, Artificial Sequence
  Description of Artificial Sequence: Synthetic probe
ttaaggtttagttaggygagtgtttgtttataaaatgtgtgttaggattt

SEQ ID NO: 5702 - DNA, 50 bp, Artificial Sequence
  Description of Artificial Sequence: Synthetic probe
taaaacccaatcaaacraatacctacctataaaatatatatcaaaacccc

SEQ ID NO: 5703 - DNA, 50 bp, Artificial Sequence
  Description of Artificial Sequence: Synthetic probe
aaaacaacctaaaacctcaaatttaacttaacaaattcattaactatttc

SEQ ID NO: 5704 - DNA, 50 bp, Artificial Sequence
  Description of Artificial Sequence: Synthetic probe
ctacactaaacccacctaaataatccataataatctctataaaatcaacc

SEQ ID NO: 5705 - DNA, 50 bp, Artificial Sequence
  Description of Artificial Sequence: Synthetic probe
aaaaacatccaaaatttaaacaactcaaatttccaccratataaaaaatc

SEQ ID NO: 5706 - DNA, 50 bp, Artificial Sequence
  Description of Artificial Sequence: Synthetic probe
aaaactcaatcctaaaaaaaatctccacacaaatactaaaaaacccctcc

SEQ ID NO: 5707 - DNA, 50 bp, Artificial Sequence
  Description of Artificial Sequence: Synthetic probe
taacrtaaaaaaaaccraccrctaaaaaacttttaaaaacrcrcraaacc

SEQ ID NO: 5708 - DNA, 50 bp, Artificial Sequence
  Description of Artificial Sequence: Synthetic probe
ccaaaaaaaacaacrctaaaacctcaatcacrtcracraaaaacaaatac

SEQ ID NO: 5709 - DNA, 50 bp, Artificial Sequence
  Description of Artificial Sequence: Synthetic probe
taccraaaaacaaacraaactaacrcctcctaataactacaataaaaaac

SEQ ID NO: 5710 - DNA, 50 bp, Artificial Sequence
  Description of Artificial Sequence: Synthetic probe
ccrctattcccaataaaaaataactttctaaaaaaatcccttctacccac

SEQ ID NO: 5711 - DNA, 50 bp, Artificial Sequence
  Description of Artificial Sequence: Synthetic probe
taacaacratctctactccctcatattaaaaaaaacctattatactatcc

SEQ ID NO: 5712 - DNA, 50 bp, Artificial Sequence
  Description of Artificial Sequence: Synthetic probe
ataactctcrctacaacttcctaaaaactaactaattaactcccatatcc

SEQ ID NO: 5713 - DNA, 50 bp, Artificial Sequence
  Description of Artificial Sequence: Synthetic probe
ttaaactaaaaaaaaccraactacctcaaacttctaatctccaactacrc

SEQ ID NO: 5714 - DNA, 50 bp, Artificial Sequence
  Description of Artificial Sequence: Synthetic probe
tttagtttttaattgtgagtgatttgttagttttggttttttgaggtgtt

SEQ ID NO: 5715 - DNA, 50 bp, Artificial Sequence
  Description of Artificial Sequence: Synthetic probe
taaattaaacaacaattacatatatcaaatcacatacaaaacacaccatc

SEQ ID NO: 5716 - DNA, 50 bp, Artificial Sequence
  Description of Artificial Sequence: Synthetic probe
caaaataaatattacaaaaaataacatacaccaacttacctctaatatac

SEQ ID NO: 5717 - DNA, 50 bp, Artificial Sequence
  Description of Artificial Sequence: Synthetic probe
aactctataataccatttaacttattaacattacttttatttaaaaaaac

SEQ ID NO: 5718 - DNA, 50 bp, Artificial Sequence
  Description of Artificial Sequence: Synthetic probe
aaaattctaaactccattactaaccraatcttaattctttaaaccacrcc

SEQ ID NO: 5719 - DNA, 50 bp, Artificial Sequence
  Description of Artificial Sequence: Synthetic probe
acaaatatacracttaccaattaaatcrccctacaactcaaaccccttac

SEQ ID NO: 5720 - DNA, 50 bp, Artificial Sequence
  Description of Artificial Sequence: Synthetic probe
caaatatcataaccaaatcaccctcacatccaatatctctaaaaaataac

SEQ ID NO: 5721 - DNA, 50 bp, Artificial Sequence
  Description of Artificial Sequence: Synthetic probe
ttaaaaaatcaccrcataccraacaatataaactcattatcaatcatatc

SEQ ID NO: 5722 - DNA, 50 bp, Artificial Sequence
  Description of Artificial Sequence: Synthetic probe
crcrataaaaaaactccaatcrtcacaccrcaaactaaaaattacrcttc

SEQ ID NO: 5723 - DNA, 50 bp, Artificial Sequence
  Description of Artificial Sequence: Synthetic probe
actaccaaaaaataacctatccctaaaacaaaacaacaataaataccctc

SEQ ID NO: 5724 - DNA, 50 bp, Artificial Sequence
  Description of Artificial Sequence: Synthetic probe
atacraaatatataatccraaatatcaacccccccccaaaaaacraaacc

SEQ ID NO: 5725 - DNA, 50 bp, Artificial Sequence
  Description of Artificial Sequence: Synthetic probe
atcctaacttctctccaaaatattaaaaattctataccctaaaaaattcc

SEQ ID NO: 5726 - DNA, 50 bp, Artificial Sequence
  Description of Artificial Sequence: Synthetic probe
taaaccccaacracrcrcaaaatccttataattaatttactaactacctc

SEQ ID NO: 5727 - DNA, 50 bp, Artificial Sequence
  Description of Artificial Sequence: Synthetic probe
aaacraaaatcraatcraaaacrccaaatatcctaacaacaaaatctccc

SEQ ID NO: 5728 - DNA, 50 bp, Artificial Sequence
  Description of Artificial Sequence: Synthetic probe
atcactttaaaaaataaattttcttaataaatctacctatcatatttaac

SEQ ID NO: 5729 - DNA, 50 bp, Artificial Sequence
  Description of Artificial Sequence: Synthetic probe
gtaattttagtgagagtttggattgtatttgttttggatttagttaagga

SEQ ID NO: 5730 - DNA, 50 bp, Artificial Sequence
  Description of Artificial Sequence: Synthetic probe
caattttaataaaaatttaaactacatctaccttaaacccaaccaaaaac

SEQ ID NO: 5731 - DNA, 50 bp, Artificial Sequence
  Description of Artificial Sequence: Synthetic probe
crccrctaaaatccattataaaatattccraccaataaactccrattctc

SEQ ID NO: 5732 - DNA, 50 bp, Artificial Sequence
  Description of Artificial Sequence: Synthetic probe
acctaaataaataaaacactacacttaccactacattcccataacacatc

SEQ ID NO: 5733 - DNA, 50 bp, Artificial Sequence
  Description of Artificial Sequence: Synthetic probe
tgttaaaaagtgtgtttgtagtttttggggattgtggtaatatgtattta

SEQ ID NO: 5734 - DNA, 50 bp, Artificial Sequence
  Description of Artificial Sequence: Synthetic probe
accaaaaaatatacttacaatccctaaaaattataacaatatatatccac

SEQ ID NO: 5735 - DNA, 50 bp, Artificial Sequence
  Description of Artificial Sequence: Synthetic probe
tcactcaaaaactcaaataaattaaaccctttttcctctaataaacaaca

SEQ ID NO: 5736 - DNA, 50 bp, Artificial Sequence
  Description of Artificial Sequence: Synthetic probe
attattattatcctatttatttaaaaactttacttctttatccaataaac

SEQ ID NO: 5737 - DNA, 50 bp, Artificial Sequence
  Description of Artificial Sequence: Synthetic probe
aacraaaaaaacccaaaacrctacrattcacaaaatacrataacaacrcc

SEQ ID NO: 5738 - DNA, 50 bp, Artificial Sequence
  Description of Artificial Sequence: Synthetic probe
atttactaactacctcraaaaaccctattaccaaaatacttaacrttccc

SEQ ID NO: 5739 - DNA, 50 bp, Artificial Sequence
  Description of Artificial Sequence: Synthetic probe
rctttctctcatttaaccaatttctttctctaccraaaactccrtatccc

SEQ ID NO: 5740 - DNA, 50 bp, Artificial Sequence
  Description of Artificial Sequence: Synthetic probe
ttcaccatattatccaaattaatctcaaactcctaacctcaaataatcca

SEQ ID NO: 5741 - DNA, 50 bp, Artificial Sequence
  Description of Artificial Sequence: Synthetic probe
ttaaaaaataccratatttatatcacataaaacaatttactcractaaac

SEQ ID NO: 5742 - DNA, 50 bp, Artificial Sequence
  Description of Artificial Sequence: Synthetic probe
aaaaaatatcacrttaaaaacratcccaatctcctaacttaaaaccctac

SEQ ID NO: 5743 - DNA, 50 bp, Artificial Sequence
  Description of Artificial Sequence: Synthetic probe
ccrtaatcaacraaacaaaaattttcttactaataaatcaaaataacatc

SEQ ID NO: 5744 - DNA, 50 bp, Artificial Sequence
  Description of Artificial Sequence: Synthetic probe
aaatccataaacaaaattatattacaatttacrataaacaaccacttcac

SEQ ID NO: 5745 - DNA, 50 bp, Artificial Sequence
  Description of Artificial Sequence: Synthetic probe
ttygtaattaaygggataaaaatttttttgttgatgggttaagatggtat

SEQ ID NO: 5746 - DNA, 50 bp, Artificial Sequence
  Description of Artificial Sequence: Synthetic probe
ataacrtaatataataactaaaaaaccccrcccctctaatacatttcccc

SEQ ID NO: 5747 - DNA, 50 bp, Artificial Sequence
  Description of Artificial Sequence: Synthetic probe
cttctaaatctccccaaatctccaacccactaaaattttctcttccaaac

SEQ ID NO: 5748 - DNA, 50 bp, Artificial Sequence
  Description of Artificial Sequence: Synthetic probe
tcactattcctcttaaaaaaaatctataaactccaccaccacraaataac

SEQ ID NO: 5749 - DNA, 50 bp, Artificial Sequence
  Description of Artificial Sequence: Synthetic probe
caaacccattaaaaaaacctaccctctaaaataaccataaataaaatacc

SEQ ID NO: 5750 - DNA, 50 bp, Artificial Sequence
  Description of Artificial Sequence: Synthetic probe
tataacctcttctttaaatctaacrctctccraaactaaaaactaccccc

SEQ ID NO: 5751 - DNA, 50 bp, Artificial Sequence
  Description of Artificial Sequence: Synthetic probe
crcctaaaaaaatacacaactcaaccctaaaccccataattcrctttaac

SEQ ID NO: 5752 - DNA, 50 bp, Artificial Sequence
  Description of Artificial Sequence: Synthetic probe
tygtttaagagagtgtatagtttagttttggattttatgattygttttga

SEQ ID NO: 5753 - DNA, 50 bp, Artificial Sequence
  Description of Artificial Sequence: Synthetic probe
caataccaacaacaaaattacaaccaacaactttccrtctttaaaaaatc

SEQ ID NO: 5754 - DNA, 50 bp, Artificial Sequence
  Description of Artificial Sequence: Synthetic probe
taaaaaaccrtatctcaacrctttaacctaacractttaaacrtatttac

SEQ ID NO: 5755 - DNA, 50 bp, Artificial Sequence
  Description of Artificial Sequence: Synthetic probe
aactaacaccacctcaaattaacrcactaaaacrttccaattctcacacc

SEQ ID NO: 5756 - DNA, 50 bp, Artificial Sequence
  Description of Artificial Sequence: Synthetic probe
aacttataaaaacccaatatttaaactctataaataaccttaaacttttc

SEQ ID NO: 5757 - DNA, 50 bp, Artificial Sequence
  Description of Artificial Sequence: Synthetic probe
caaaaaaccrtcttcatacrattatactaaaaacacaccaaacraataac

SEQ ID NO: 5758 - DNA, 50 bp, Artificial Sequence
  Description of Artificial Sequence: Synthetic probe
acaactctaaaccacctcrccaaactacaaacaaatttcttaatcttacc

SEQ ID NO: 5759 - DNA, 50 bp, Artificial Sequence
  Description of Artificial Sequence: Synthetic probe
aaaaaaccttcaacaatctaacrttcaaaaataataatcacaataaaacc

SEQ ID NO: 5760 - DNA, 50 bp, Artificial Sequence
  Description of Artificial Sequence: Synthetic probe
ctaaccccatcctacaaaaaataacaaatattaacaactaacaccaatac

SEQ ID NO: 5761 - DNA, 50 bp, Artificial Sequence
  Description of Artificial Sequence: Synthetic probe
gggggaatttttaatagtttgaygtttagaaatgatgattataatggaat

SEQ ID NO: 5762 - DNA, 50 bp, Artificial Sequence
  Description of Artificial Sequence: Synthetic probe
tacaaatataatttttaaaaaatccaaactatccttcaaatccaaatatc

SEQ ID NO: 5763 - DNA, 50 bp, Artificial Sequence
  Description of Artificial Sequence: Synthetic probe
racaacraaaaatatcctaaataaatctataactaccraacacacccrcc

SEQ ID NO: 5764 - DNA, 50 bp, Artificial Sequence
  Description of Artificial Sequence: Synthetic probe
acraaaacaatcrtcatctaaaatttccctaacaataaaacraacccrac

SEQ ID NO: 5765 - DNA, 50 bp, Artificial Sequence
  Description of Artificial Sequence: Synthetic probe
aaaaacrtaaacacaccacctaccctaccatataaatatacaactttaac

SEQ ID NO: 5766 - DNA, 50 bp, Artificial Sequence
  Description of Artificial Sequence: Synthetic probe
tattatttttatattgaagataaggaatygaagtttaagagaggtagtgt

SEQ ID NO: 5767 - DNA, 50 bp, Artificial Sequence
  Description of Artificial Sequence: Synthetic probe
atattaaaaacaactaaacttttccctctttaaatcataaaaacacacac

SEQ ID NO: 5768 - DNA, 50 bp, Artificial Sequence
  Description of Artificial Sequence: Synthetic probe
taggagagttttaatttaggttaattttgtgtgtttatagtatttattgt

SEQ ID NO: 5769 - DNA, 50 bp, Artificial Sequence
  Description of Artificial Sequence: Synthetic probe
aaaaaaatcctaacccaaaccaaccttatatatccacaacatctactacc

SEQ ID NO: 5770 - DNA, 50 bp, Artificial Sequence
  Description of Artificial Sequence: Synthetic probe
ttatttttygttttgtgtttgtaggtgtttgagtagtttagtttagtgta

SEQ ID NO: 5771 - DNA, 50 bp, Artificial Sequence
  Description of Artificial Sequence: Synthetic probe
tacccctcrccctatacctataaatatttaaacaattcaatttaatacac

SEQ ID NO: 5772 - DNA, 50 bp, Artificial Sequence
  Description of Artificial Sequence: Synthetic probe
aattcaaatctaatacctacctattacaactatataacttttaacaaacc

SEQ ID NO: 5773 - DNA, 50 bp, Artificial Sequence
  Description of Artificial Sequence: Synthetic probe
aaacctaaaaaaaccctaaaataaaccccrtaaaaaaattcaaaaactac

SEQ ID NO: 5774 - DNA, 50 bp, Artificial Sequence
  Description of Artificial Sequence: Synthetic probe
aaacaataaaaactaacrctataattcatatctataaaactaaaattttc

SEQ ID NO: 5775 - DNA, 50 bp, Artificial Sequence
  Description of Artificial Sequence: Synthetic probe
aagatagtaagagttagygttatggtttatatttgtaaaattagagtttt

SEQ ID NO: 5776 - DNA, 50 bp, Artificial Sequence
  Description of Artificial Sequence: Synthetic probe
tcatctaaatataatccatatttcctaattctccccractcaactaatac

SEQ ID NO: 5777 - DNA, 50 bp, Artificial Sequence
  Description of Artificial Sequence: Synthetic probe
aaaaaataaaatacacataaaaaaaatctcccctataacttaaaacaacc

SEQ ID NO: 5778 - DNA, 50 bp, Artificial Sequence
  Description of Artificial Sequence: Synthetic probe
attcccaaataaccratttctattaacctcaccaccraccaataataatc

SEQ ID NO: 5779 - DNA, 50 bp, Artificial Sequence
  Description of Artificial Sequence: Synthetic probe
ggtttttagatggtygatttttattggttttattatygattaatgatggt

SEQ ID NO: 5780 - DNA, 50 bp, Artificial Sequence
  Description of Artificial Sequence: Synthetic probe
tataatcctaaacraatcrcaaaacctctccaaacctattttctcaccac

SEQ ID NO: 5781 - DNA, 50 bp, Artificial Sequence
  Description of Artificial Sequence: Synthetic probe
taattataacracraaacaaattcctcaaaaccactcratcaatctatac

SEQ ID NO: 5782 - DNA, 50 bp, Artificial Sequence
  Description of Artificial Sequence: Synthetic probe
aattataacaacaaaacaaattcctcaaaaccactcaatcaatctataca

SEQ ID NO: 5783 - DNA, 50 bp, Artificial Sequence
  Description of Artificial Sequence: Synthetic probe
aaaaccacrttccaaaatcraatttaataaattcctcaatccctaccrcc

SEQ ID NO: 5784 - DNA, 50 bp, Artificial Sequence
  Description of Artificial Sequence: Synthetic probe
craaaataaaaacaacttccratacaaccccrccraaaacrtaaactatc

SEQ ID NO: 5785 - DNA, 50 bp, Artificial Sequence
  Description of Artificial Sequence: Synthetic probe
aacaaaaaaccaaaaccatttcccaaactaactaccttaaaatataaacc

SEQ ID NO: 5786 - DNA, 50 bp, Artificial Sequence
  Description of Artificial Sequence: Synthetic probe
caacrttttcccrccttttcaataacctaaatcrctacaaataaaaaaac

SEQ ID NO: 5787 - DNA, 50 bp, Artificial Sequence
  Description of Artificial Sequence: Synthetic probe
tccaaaaacacctaataaaaaattaataaccaaacrtataaaataataac

SEQ ID NO: 5788 - DNA, 50 bp, Artificial Sequence
  Description of Artificial Sequence: Synthetic probe
ttctaaaacaaaacatctacctttctattcttttcaaaaaaaatctcrac

SEQ ID NO: 5789 - DNA, 50 bp, Artificial Sequence
  Description of Artificial Sequence: Synthetic probe
ttcaaaatccttaaacttcratccacactaaaataccaaacaataaacac

SEQ ID NO: 5790 - DNA, 50 bp, Artificial Sequence
  Description of Artificial Sequence: Synthetic probe
aatttatatctctcaaaataaaaactttaaaaaaaactcatccrtatacc

SEQ ID NO: 5791 - DNA, 50 bp, Artificial Sequence
  Description of Artificial Sequence: Synthetic probe
ttttagggtttttaggtttyggtttatattaagatattaggtagtgaata

SEQ ID NO: 5792 - DNA, 50 bp, Artificial Sequence
  Description of Artificial Sequence: Synthetic probe
taaaaaactccaaacccaaacttctaaactacaaatcctacctcaccctc

SEQ ID NO: 5793 - DNA, 50 bp, Artificial Sequence
  Description of Artificial Sequence: Synthetic probe
tttaaaactaaaaacaaaactaattctcctcaactaatatcatattaaac

SEQ ID NO: 5794 - DNA, 50 bp, Artificial Sequence
  Description of Artificial Sequence: Synthetic probe
aaaacctaatctcaacttttctactcaaacttctaaaactttaaatcccc

SEQ ID NO: 5795 - DNA, 50 bp, Artificial Sequence
  Description of Artificial Sequence: Synthetic probe
taacactactatcttactacctcacrataatatctttctaccaaataacc

SEQ ID NO: 5796 - DNA, 50 bp, Artificial Sequence
  Description of Artificial Sequence: Synthetic probe
aatatctttctaccaaataaccrccctacaaaaaaacctaaccaacctcc

SEQ ID NO: 5797 - DNA, 50 bp, Artificial Sequence
  Description of Artificial Sequence: Synthetic probe
caaaaacaaaaacccccaaaaccracctaaaaaaaactccaactatcacc

SEQ ID NO: 5798 - DNA, 50 bp, Artificial Sequence
  Description of Artificial Sequence: Synthetic probe
aaaatcttacctacrtcttacaactactacaaactcactttcaatcccrc

SEQ ID NO: 5799 - DNA, 50 bp, Artificial Sequence
  Description of Artificial Sequence: Synthetic probe
acaaaatcttacctacrtcttacaactactacaaactcactttcaatccc

SEQ ID NO: 5800 - DNA, 50 bp, Artificial Sequence
  Description of Artificial Sequence: Synthetic probe
taaataaacacataaaaaaactacattactaaaccaaaatctataaatac

SEQ ID NO: 5801 - DNA, 50 bp, Artificial Sequence
  Description of Artificial Sequence: Synthetic probe
tctttacttcaaactctcttatccaaatcaacctttattataaaataacc

SEQ ID NO: 5802 - DNA, 50 bp, Artificial Sequence
  Description of Artificial Sequence: Synthetic probe
aaaacaacctaaaaaaccccaaaacccraactatctcaataccccttaac

SEQ ID NO: 5803 - DNA, 50 bp, Artificial Sequence
  Description of Artificial Sequence: Synthetic probe
aaaacratatataaattaaaaaatcccaaccttaaaaattccccaactcc

SEQ ID NO: 5804 - DNA, 50 bp, Artificial Sequence
  Description of Artificial Sequence: Synthetic probe
aaacaatatataaattaaaaaatcccaaccttaaaaattccccaactcca

SEQ ID NO: 5805 - DNA, 50 bp, Artificial Sequence
  Description of Artificial Sequence: Synthetic probe
aaacaaaatataatttaaattctataatcctcaccccracctcatacrtc

SEQ ID NO: 5806 - DNA, 50 bp, Artificial Sequence
  Description of Artificial Sequence: Synthetic probe
gggatttagtttaagtttttataggttagttatagggttgtaaggatttt

SEQ ID NO: 5807 - DNA, 50 bp, Artificial Sequence
  Description of Artificial Sequence: Synthetic probe
actaaaatcaacrtaaacctaaaatataaaatatcccaccaaaatataac

SEQ ID NO: 5808 - DNA, 50 bp, Artificial Sequence
  Description of Artificial Sequence: Synthetic probe
gagttgtgttttgggaaagttttaataggtttgttaggtaagttatagtt

SEQ ID NO: 5809 - DNA, 50 bp, Artificial Sequence
  Description of Artificial Sequence: Synthetic probe
aactatactctaaaaaaaccccaacaaacctaccaaacaaactacaaccc

SEQ ID NO: 5810 - DNA, 50 bp, Artificial Sequence
  Description of Artificial Sequence: Synthetic probe
aatctaaaaacccrctatccctaaataacaaaaaataattaaacaaacac

SEQ ID NO: 5811 - DNA, 50 bp, Artificial Sequence
  Description of Artificial Sequence: Synthetic probe
tctattttaaaatacttctttcctcaactaactattatcttaccataccc

SEQ ID NO: 5812 - DNA, 50 bp, Artificial Sequence
  Description of Artificial Sequence: Synthetic probe
atacraattcaacataactaccrcaaaccaaaaacacacacaacrcaaac

SEQ ID NO: 5813 - DNA, 50 bp, Artificial Sequence
  Description of Artificial Sequence: Synthetic probe
tgaggttygagaatttattgttgtaattattttatgttggaatttgaagg

SEQ ID NO: 5814 - DNA, 50 bp, Artificial Sequence
  Description of Artificial Sequence: Synthetic probe
aaaacccraaaatccactactacaatcactccatactaaaacttaaaaac

SEQ ID NO: 5815 - DNA, 50 bp, Artificial Sequence
  Description of Artificial Sequence: Synthetic probe
ataaatcaaaaacactccaaaaaatcttaaatataaaataaacttccccc

SEQ ID NO: 5816 - DNA, 50 bp, Artificial Sequence
  Description of Artificial Sequence: Synthetic probe
caaccrttaaaacrtccttaaacttctaaactaatacccatatatacctc

SEQ ID NO: 5817 - DNA, 50 bp, Artificial Sequence
  Description of Artificial Sequence: Synthetic probe
gataagtatataaaagtattattaggaagaagttggtttttgggaaaggt

SEQ ID NO: 5818 - DNA, 50 bp, Artificial Sequence
  Description of Artificial Sequence: Synthetic probe
aaacrataaatttccttcctccrcctacctcttaaataacrtaatatctc

SEQ ID NO: 5819 - DNA, 50 bp, Artificial Sequence
  Description of Artificial Sequence: Synthetic probe
aataaaaatcaaaaaaacattacatttaattcaaatttcaaccaaactac

SEQ ID NO: 5820 - DNA, 50 bp, Artificial Sequence
  Description of Artificial Sequence: Synthetic probe
acttacctcaaattcctcatctataaaataaaaaaccctctattataatc

SEQ ID NO: 5821 - DNA, 50 bp, Artificial Sequence
  Description of Artificial Sequence: Synthetic probe
acaactccttcccttaatcatactaccctccraaaatcaatttaaatatc

SEQ ID NO: 5822 - DNA, 50 bp, Artificial Sequence
  Description of Artificial Sequence: Synthetic probe
actatcaaaacaaaaaccrccatctaataaaaaacraaatacratacccc

SEQ ID NO: 5823 - DNA, 50 bp, Artificial Sequence
  Description of Artificial Sequence: Synthetic probe
rctaaaaacratatcaaacccctaaaccttacactaacttaaacraccrc

SEQ ID NO: 5824 - DNA, 50 bp, Artificial Sequence
  Description of Artificial Sequence: Synthetic probe
tcraacrctaaaaacratatcaaacccctaaaccttacactaacttaaac

SEQ ID NO: 5825 - DNA, 50 bp, Artificial Sequence
  Description of Artificial Sequence: Synthetic probe
aaatccaaaacaaatcccraaaaaacacratatcctccacaacaaacctc

SEQ ID NO: 5826 - DNA, 50 bp, Artificial Sequence
  Description of Artificial Sequence: Synthetic probe
aaatacaaaactccaaaaaaacrtccraaccraaatccaaaacaaatccc

SEQ ID NO: 5827 - DNA, 50 bp, Artificial Sequence
  Description of Artificial Sequence: Synthetic probe
acatctccaacctaaaacccaacccaaaaatctcaaatttaacrcatcac

SEQ ID NO: 5828 - DNA, 50 bp, Artificial Sequence
  Description of Artificial Sequence: Synthetic probe
aaacrcaaaaaataaacrcccctctctataaaccctcaataaatccrcac

SEQ ID NO: 5829 - DNA, 50 bp, Artificial Sequence
  Description of Artificial Sequence: Synthetic probe
tccaacctaaaacccaacccaaaaatctcaaatttaacrcatcacrtaac

SEQ ID NO: 5830 - DNA, 50 bp, Artificial Sequence
  Description of Artificial Sequence: Synthetic probe
actaaaacrcaaaaaataaacrcccctctctataaaccctcaataaatcc

SEQ ID NO: 5831 - DNA, 50 bp, Artificial Sequence
  Description of Artificial Sequence: Synthetic probe
aatttggaatttaatttagaagttttaagtttgaygtattaygtggygtg

SEQ ID NO: 5832 - DNA, 50 bp, Artificial Sequence
  Description of Artificial Sequence: Synthetic probe
ttaacrcatcacrtaacrtacraatccactaaaaatccacaaaaaaaaac

SEQ ID NO: 5833 - DNA, 50 bp, Artificial Sequence
  Description of Artificial Sequence: Synthetic probe
catctcctacrtctcaattatcctaataattatatatctacccattattc

SEQ ID NO: 5834 - DNA, 50 bp, Artificial Sequence
  Description of Artificial Sequence: Synthetic probe
tctccaaaatattaaaaattctataccctaaaaaattccractcaaatcc

SEQ ID NO: 5835 - DNA, 50 bp, Artificial Sequence
  Description of Artificial Sequence: Synthetic probe
caaaatattaaaaattctataccctaaaaaattccractcaaatccraac

SEQ ID NO: 5836 - DNA, 50 bp, Artificial Sequence
  Description of Artificial Sequence: Synthetic probe
ctaaaacacrttaaaataataaaacattatccctctaatctttcaccctc

SEQ ID NO: 5837 - DNA, 50 bp, Artificial Sequence
  Description of Artificial Sequence: Synthetic probe
ccccrcccttaccaaataataacaaaacaaccratataacrctaaaacac

SEQ ID NO: 5838 - DNA, 50 bp, Artificial Sequence
  Description of Artificial Sequence: Synthetic probe
aaaataaaaaaccaaaaaaacaatattctactatcccaacrtacttcaac

SEQ ID NO: 5839 - DNA, 50 bp, Artificial Sequence
  Description of Artificial Sequence: Synthetic probe
aaaccaaaaaaacaatattctactatcccaacrtacttcaacrccacacc

SEQ ID NO: 5840 - DNA, 50 bp, Artificial Sequence
  Description of Artificial Sequence: Synthetic probe
aattataaacacrccacrtataatcctttcccaactatcaatattctccc

SEQ ID NO: 5841 - DNA, 50 bp, Artificial Sequence
  Description of Artificial Sequence: Synthetic probe
ccataacctaaattattcaaatttaaaaaataaccccaataaatcctttc

SEQ ID NO: 5842 - DNA, 50 bp, Artificial Sequence
  Description of Artificial Sequence: Synthetic probe
aacrtaaaccactacccccaactaaaaaaatcaatcttacacraaactcc

SEQ ID NO: 5843 - DNA, 50 bp, Artificial Sequence
  Description of Artificial Sequence: Synthetic probe
aaattacaaacrtaaaccactacccccaactaaaaaaatcaatcttacac

SEQ ID NO: 5844 - DNA, 50 bp, Artificial Sequence
  Description of Artificial Sequence: Synthetic probe
ttaagttgtttagatttaggaagtgattttagtaagttttttyggagttt

SEQ ID NO: 5845 - DNA, 50 bp, Artificial Sequence
  Description of Artificial Sequence: Synthetic probe
catctttcttcctctacaacacacracacrccctaattaaaaacaaaatc

SEQ ID NO: 5846 - DNA, 50 bp, Artificial Sequence
  Description of Artificial Sequence: Synthetic probe
ccraataccaaaatataccttacacracrcctaacctaaaattaaacccc

SEQ ID NO: 5847 - DNA, 50 bp, Artificial Sequence
  Description of Artificial Sequence: Synthetic probe
craaaacaactatactaaacctcttccraataccaaaatataccttacac

SEQ ID NO: 5848 - DNA, 50 bp, Artificial Sequence
  Description of Artificial Sequence: Synthetic probe
taataaaaaaaatcraatcacctcraaaacaactatactaaacctcttcc

SEQ ID NO: 5849 - DNA, 50 bp, Artificial Sequence
  Description of Artificial Sequence: Synthetic probe
acraaatctaacctcaaatcaaacrccrtacaaaatacatcttaacaccc

SEQ ID NO: 5850 - DNA, 50 bp, Artificial Sequence
  Description of Artificial Sequence: Synthetic probe
ctcccctaccaattaaaacrcccttattaccaaacttacracraaaaaac

SEQ ID NO: 5851 - DNA, 50 bp, Artificial Sequence
  Description of Artificial Sequence: Synthetic probe
ccctaccaattaaaacrcccttattaccaaacttacracraaaaaacrac

SEQ ID NO: 5852 - DNA, 50 bp, Artificial Sequence
  Description of Artificial Sequence: Synthetic probe
tataaaatattccraccaataaactccrattctcrcctctaataacaaac

SEQ ID NO: 5853 - DNA, 50 bp, Artificial Sequence
  Description of Artificial Sequence: Synthetic probe
accaatcataaaaattttacrcrccrctaaaatccattataaaatattcc

SEQ ID NO: 5854 - DNA, 50 bp, Artificial Sequence
  Description of Artificial Sequence: Synthetic probe
caacaaaatctcccraaacaaccaacaaaccaatcataaaaattttacrc

SEQ ID NO: 5855 - DNA, 50 bp, Artificial Sequence
  Description of Artificial Sequence: Synthetic probe
gtaatagggtttttygaggtagttagtaaattaattataaggattttgyg

SEQ ID NO: 5856 - DNA, 50 bp, Artificial Sequence
  Description of Artificial Sequence: Synthetic probe
aacaacaaaatctcccraaacaaccaacaaaccaatcataaaaattttac

SEQ ID NO: 5857 - DNA, 50 bp, Artificial Sequence
  Description of Artificial Sequence: Synthetic probe
tggtaatagggtttttygaggtagttagtaaattaattataaggattttg

SEQ ID NO: 5858 - DNA, 50 bp, Artificial Sequence
  Description of Artificial Sequence: Synthetic probe
aaaattacaaacataaaccacaaaacccracccaatttttttaaaatttc

SEQ ID NO: 5859 - DNA, 50 bp, Artificial Sequence
  Description of Artificial Sequence: Synthetic probe
aaacataaaccacaaaacccracccaatttttttaaaatttcrccttatc

SEQ ID NO: 5860 - DNA, 50 bp, Artificial Sequence
  Description of Artificial Sequence: Synthetic probe
acaataacataatcttaactcacttcaacctccrcttcctctaatcaaac

SEQ ID NO: 5861 - DNA, 50 bp, Artificial Sequence
  Description of Artificial Sequence: Synthetic probe
ttatactatttccctaacccataataatcacccctcatcctctacaaatc

SEQ ID NO: 5862 - DNA, 50 bp, Artificial Sequence
  Description of Artificial Sequence: Synthetic probe
ctaactcaaatactacccttctctataaaatatttatcccaatcttaacc

SEQ ID NO: 5863 - DNA, 50 bp, Artificial Sequence
  Description of Artificial Sequence: Synthetic probe
aaaatcttttctattcacctctatcaaccacaacacttaccaaaaataac

SEQ ID NO: 5864 - DNA, 50 bp, Artificial Sequence
  Description of Artificial Sequence: Synthetic probe
ccaacccrcaccccaattatctaaccctcatcaatttatacaaaaaaacc

SEQ ID NO: 5865 - DNA, 50 bp, Artificial Sequence
  Description of Artificial Sequence: Synthetic probe
taaactctacctccaaaatcrtaataacctcaaataacaacacaataacc

SEQ ID NO: 5866 - DNA, 50 bp, Artificial Sequence
  Description of Artificial Sequence: Synthetic probe
atccctccaaaaaaaattccratcactatactaccacctaaaaccatcac

SEQ ID NO: 5867 - DNA, 50 bp, Artificial Sequence
  Description of Artificial Sequence: Synthetic probe
cactatactaccacctaaaaccatcacratcctaaaaacaaaacccatac

SEQ ID NO: 5868 - DNA, 50 bp, Artificial Sequence
  Description of Artificial Sequence: Synthetic probe
taaacctcaaaccctatatacaaaaaaactcacctcaatctccaacatcc

SEQ ID NO: 5869 - DNA, 50 bp, Artificial Sequence
  Description of Artificial Sequence: Synthetic probe
ttattgtgttgttatttgaggttattaygattttggaggtagagtttata

SEQ ID NO: 5870 - DNA, 50 bp, Artificial Sequence
  Description of Artificial Sequence: Synthetic probe
aatctaaaaattcttacccttactctacaaaaactaaaaataaaaaccrc

SEQ ID NO: 5871 - DNA, 50 bp, Artificial Sequence
  Description of Artificial Sequence: Synthetic probe
aaaaactactcacctctaaactaaataaaactaacaaacrcaactcctcc

SEQ ID NO: 5872 - DNA, 50 bp, Artificial Sequence
  Description of Artificial Sequence: Synthetic probe
aaacttataaaacaaaaccccttaaatattattacaaaaataaccccccc

SEQ ID NO: 5873 - DNA, 50 bp, Artificial Sequence
  Description of Artificial Sequence: Synthetic probe
acaaaaccccttaaatattattacaaaaataacccccccraaaaaactac

SEQ ID NO: 5874 - DNA, 50 bp, Artificial Sequence
  Description of Artificial Sequence: Synthetic probe
aactcataccttacataaaaatacccatctaaaaaacrtaaaccaaatac

SEQ ID NO: 5875 - DNA, 50 bp, Artificial Sequence
  Description of Artificial Sequence: Synthetic probe
caaaaatccttaatacaaataataaaaaatacccctttctacrccccatc

SEQ ID NO: 5876 - DNA, 50 bp, Artificial Sequence
  Description of Artificial Sequence: Synthetic probe
tagtttatattttgtataagggtatttatttgggaagygtaggttagata

SEQ ID NO: 5877 - DNA, 50 bp, Artificial Sequence
  Description of Artificial Sequence: Synthetic probe
ttactccttttcctatcattctaataaactactaacaaaaccccacaccc

SEQ ID NO: 5878 - DNA, 50 bp, Artificial Sequence
  Description of Artificial Sequence: Synthetic probe
tcaaatacataaaaaccccrcacaaaccctctccaaattcctctaaaaac

SEQ ID NO: 5879 - DNA, 50 bp, Artificial Sequence
  Description of Artificial Sequence: Synthetic probe
craaaaaatctaaatctccttatcccaaaacaataaccracracracrac

SEQ ID NO: 5880 - DNA, 50 bp, Artificial Sequence
  Description of Artificial Sequence: Synthetic probe
ctccraaaaaatctaaatctccttatcccaaaacaataaccracracrac

SEQ ID NO: 5881 - DNA, 50 bp, Artificial Sequence
  Description of Artificial Sequence: Synthetic probe
tttctccraaaaaatctaaatctccttatcccaaaacaataaccracrac

SEQ ID NO: 5882 - DNA, 50 bp, Artificial Sequence
  Description of Artificial Sequence: Synthetic probe
aaatttctccraaaaaatctaaatctccttatcccaaaacaataaccrac

SEQ ID NO: 5883 - DNA, 50 bp, Artificial Sequence
  Description of Artificial Sequence: Synthetic probe
ctaaaatttctccraaaaaatctaaatctccttatcccaaaacaataacc

SEQ ID NO: 5884 - DNA, 50 bp, Artificial Sequence
  Description of Artificial Sequence: Synthetic probe
aataaatcactaaaaaaacataaaaaattatatatatacaaacccacatc

SEQ ID NO: 5885 - DNA, 50 bp, Artificial Sequence
  Description of Artificial Sequence: Synthetic probe
aaattaaaaacttaataaaaaatctcctccattctccaaaaaatacaaac

SEQ ID NO: 5886 - DNA, 50 bp, Artificial Sequence
  Description of Artificial Sequence: Synthetic probe
ttataataaaacttctaaccttcccccactacacaacctataatacaacc

SEQ ID NO: 5887 - DNA, 50 bp, Artificial Sequence
  Description of Artificial Sequence: Synthetic probe
aaattaaaattctaaacaactccrcaaaacctctaataatcctctcraac

SEQ ID NO: 5888 - DNA, 50 bp, Artificial Sequence
  Description of Artificial Sequence: Synthetic probe
rtacccaacccccaccattcttacaaaaaattaaaattctaaacaactcc

SEQ ID NO: 5889 - DNA, 50 bp, Artificial Sequence
  Description of Artificial Sequence: Synthetic probe
tattatatagtttatggtgtagtygttygagaggattattagaggttttg

SEQ ID NO: 5890 - DNA, 50 bp, Artificial Sequence
  Description of Artificial Sequence: Synthetic probe
ttaaaattccaaataaaattaaaataactacaccacctatttactacatc

SEQ ID NO: 5891 - DNA, 50 bp, Artificial Sequence
  Description of Artificial Sequence: Synthetic probe
cataacaaaaaaaaacaaccaactaatcaaacaaaccctaacactaaaac

SEQ ID NO: 5892 - DNA, 50 bp, Artificial Sequence
  Description of Artificial Sequence: Synthetic probe
attgaagttttaagtgagattgaggtaattgtattatttgtttattgtat

SEQ ID NO: 5893 - DNA, 50 bp, Artificial Sequence
  Description of Artificial Sequence: Synthetic probe
aattaaaatactaatttcctaaaacaataattaaaatataatcccactac

SEQ ID NO: 5894 - DNA, 50 bp, Artificial Sequence
  Description of Artificial Sequence: Synthetic probe
craactaatcctcctcaactctcccacctatatacttttaacaaatcacc

SEQ ID NO: 5895 - DNA, 50 bp, Artificial Sequence
  Description of Artificial Sequence: Synthetic probe
acaattaaaaccttataaccacctaatataaataaataacaaaaccrtac

SEQ ID NO: 5896 - DNA, 50 bp, Artificial Sequence
  Description of Artificial Sequence: Synthetic probe
aaaaaaaaatcccrcatcaacctcatcccaccaaaaaaacrataataaac

SEQ ID NO: 5897 - DNA, 50 bp, Artificial Sequence
  Description of Artificial Sequence: Synthetic probe
ttaaccaacataactataaacaaaaccaacctaaaaatcataacaaaaca

SEQ ID NO: 5898 - DNA, 50 bp, Artificial Sequence
  Description of Artificial Sequence: Synthetic probe
attggttaatatagttgtggataaagttaatttggaaattatgataaagt

SEQ ID NO: 5899 - DNA, 50 bp, Artificial Sequence
  Description of Artificial Sequence: Synthetic probe
ccrctacctcraaataaatttcraatccraaaactctaaaaaacccraac

SEQ ID NO: 5900 - DNA, 50 bp, Artificial Sequence
  Description of Artificial Sequence: Synthetic probe
aaacaaatctacaaatctaatcactaaccacataaccaataacrctatac

SEQ ID NO: 5901 - DNA, 50 bp, Artificial Sequence
  Description of Artificial Sequence: Synthetic probe
tctccttcaatccrtaaccaatccttatataaacrccaaaatcrattaac

SEQ ID NO: 5902 - DNA, 50 bp, Artificial Sequence
  Description of Artificial Sequence: Synthetic probe
ccaaaaaaaaatcttaaaaaacaatactacctaaaccctacctccactcc

SEQ ID NO: 5903 - DNA, 50 bp, Artificial Sequence
  Description of Artificial Sequence: Synthetic probe
cactacttttacaaatcccaactataaactctcctttccaaaatatctcc

SEQ ID NO: 5904 - DNA, 50 bp, Artificial Sequence
  Description of Artificial Sequence: Synthetic probe
gtttttgttttttaagagtygtagatgtaatggaagagtaagtttgtaaa

SEQ ID NO: 5905 - DNA, 50 bp, Artificial Sequence
  Description of Artificial Sequence: Synthetic probe
cactactaatactactaatactaccaccaccactcaccaaaataaaaacc

SEQ ID NO: 5906 - DNA, 50 bp, Artificial Sequence
  Description of Artificial Sequence: Synthetic probe
ccccraaataatatcttactcacraataaacaaaataaccaatttaccac

SEQ ID NO: 5907 - DNA, 50 bp, Artificial Sequence
  Description of Artificial Sequence: Synthetic probe
aacrccattctaatcaaaaaaattaacacaatcaaataaccacacracac

SEQ ID NO: 5908 - DNA, 50 bp, Artificial Sequence
  Description of Artificial Sequence: Synthetic probe
ttccrattaaacatatacaaccrctctttcaataaataaatctcctcctc

SEQ ID NO: 5909 - DNA, 50 bp, Artificial Sequence
  Description of Artificial Sequence: Synthetic probe
cctacctaatcactccctactacccaaaaacaacraacttctaaatcacc

SEQ ID NO: 5910 - DNA, 50 bp, Artificial Sequence
  Description of Artificial Sequence: Synthetic probe
tatacactctcttaaacraattctccttcctcctactactaataccaaac

SEQ ID NO: 5911 - DNA, 50 bp, Artificial Sequence
  Description of Artificial Sequence: Synthetic probe
tccttataaaaaaccttaaaataaaatataatacccccttaccctcttac

SEQ ID NO: 5912 - DNA, 50 bp, Artificial Sequence
  Description of Artificial Sequence: Synthetic probe
aactacaactaatatatatataaaaacccatctaatccrtcctctcrctc

SEQ ID NO: 5913 - DNA, 50 bp, Artificial Sequence
  Description of Artificial Sequence: Synthetic probe
tttaggtttgtagattatttggttataggagggaagtttagtaygattag

SEQ ID NO: 5914 - DNA, 50 bp, Artificial Sequence
  Description of Artificial Sequence: Synthetic probe
ccaaaaactaaaccaattaattccrcraaaacaaaaccaactccrcccac

SEQ ID NO: 5915 - DNA, 50 bp, Artificial Sequence
  Description of Artificial Sequence: Synthetic probe
ataacaaatacccctataaaatacacaaccccaaacctcatcratcactc

SEQ ID NO: 5916 - DNA, 50 bp, Artificial Sequence
  Description of Artificial Sequence: Synthetic probe
gatgataagtgtttttgtgggatatatagttttaggttttatyggttatt

SEQ ID NO: 5917 - DNA, 50 bp, Artificial Sequence
  Description of Artificial Sequence: Synthetic probe
accrcttcctccaaataaactcataaatttctccaccaaaaaaattttcc

SEQ ID NO: 5918 - DNA, 50 bp, Artificial Sequence
  Description of Artificial Sequence: Synthetic probe
aaattcattcraaacctacaaaaacrtcrcaacaccaaaccttaataacc

SEQ ID NO: 5919 - DNA, 50 bp, Artificial Sequence
  Description of Artificial Sequence: Synthetic probe
caaaaatttaaataaacraaacttctcaaatcaacraccaaacataaaac

SEQ ID NO: 5920 - DNA, 50 bp, Artificial Sequence
  Description of Artificial Sequence: Synthetic probe
aaaaaaatacaaaaaaacraacaaaataactaacaccacctcaaattaac

SEQ ID NO: 5921 - DNA, 50 bp, Artificial Sequence
  Description of Artificial Sequence: Synthetic probe
acraaaataaaaactacaaattaaaaaaactctaataaaacttctctctc

SEQ ID NO: 5922 - DNA, 50 bp, Artificial Sequence
  Description of Artificial Sequence: Synthetic probe
aaaaataaaacraaacaaaaactataaataaaaaacccctataaatcctc

SEQ ID NO: 5923 - DNA, 50 bp, Artificial Sequence
  Description of Artificial Sequence: Synthetic probe
acrtcataaacttcatttccaaaatatcaatcaccaaacaaaaaaatacc

SEQ ID NO: 5924 - DNA, 50 bp, Artificial Sequence
  Description of Artificial Sequence: Synthetic probe
acctatctactacractctacttcccttaaactaaaaaactataaacttc

SEQ ID NO: 5925 - DNA, 50 bp, Artificial Sequence
  Description of Artificial Sequence: Synthetic probe
ccacattaataactacccccaaaaaattacaacrcaaccactactaaaac

SEQ ID NO: 5926 - DNA, 50 bp, Artificial Sequence
  Description of Artificial Sequence: Synthetic probe
caataaataattaacaaaaaaaacccrctctaaacratacraaattaatc

SEQ ID NO: 5927 - DNA, 50 bp, Artificial Sequence
  Description of Artificial Sequence: Synthetic probe
cacaacatttaaattcaaatatcttacaaaatattacctttcaacctaac

SEQ ID NO: 5928 - DNA, 50 bp, Artificial Sequence
  Description of Artificial Sequence: Synthetic probe
aatcctttaactaaattttaaccrtatttccatttaacrtccaaaacaac

SEQ ID NO: 5929 - DNA, 50 bp, Artificial Sequence
  Description of Artificial Sequence: Synthetic probe
taactaactactttaaaaccattaactacracactaaacttaaccctacc

SEQ ID NO: 5930 - DNA, 50 bp, Artificial Sequence
  Description of Artificial Sequence: Synthetic probe
rtaaaaatccctataacaaaccccaacacccataaaatctctctccratc

SEQ ID NO: 5931 - DNA, 50 bp, Artificial Sequence
  Description of Artificial Sequence: Synthetic probe
atcccacaaaaaccaaaccraaacraactaaaaactaacctacttcctac

SEQ ID NO: 5932 - DNA, 50 bp, Artificial Sequence
  Description of Artificial Sequence: Synthetic probe
acrcraaaaatactaaaaattaaaatcttacctttactctccttaaaacc

SEQ ID NO: 5933 - DNA, 50 bp, Artificial Sequence
  Description of Artificial Sequence: Synthetic probe
cactctcttcaacaaactaaaaaccctttattcrcttaaaaccacaaaac

SEQ ID NO: 5934 - DNA, 50 bp, Artificial Sequence
  Description of Artificial Sequence: Synthetic probe
aaaaaactccactacraaaaaacctaaaaaaattccccccacaccaccac

SEQ ID NO: 5935 - DNA, 50 bp, Artificial Sequence
  Description of Artificial Sequence: Synthetic probe
ggagtgatagttagttttaggatattatttgttgttaggtaattgagttt

SEQ ID NO: 5936 - DNA, 50 bp, Artificial Sequence
  Description of Artificial Sequence: Synthetic probe
aaaaaataaaaacraaaaactacaaacctaccrctaacttacrataaaac

SEQ ID NO: 5937 - DNA, 50 bp, Artificial Sequence
  Description of Artificial Sequence: Synthetic probe
ccacttactctttttacrattctacaaacrtaacaaaaacraacattacc

SEQ ID NO: 5938 - DNA, 50 bp, Artificial Sequence
  Description of Artificial Sequence: Synthetic probe
ctctaatataaaaataattacacatttaaatctcatcacctccttaccac

SEQ ID NO: 5939 - DNA, 50 bp, Artificial Sequence
  Description of Artificial Sequence: Synthetic probe
tctcttctaattaatactcccttctccaaccactaaccraaaaaattacc

SEQ ID NO: 5940 - DNA, 50 bp, Artificial Sequence
  Description of Artificial Sequence: Synthetic probe
tatttttaaaaggatttaggggttttatttaaggttttatggagttgggt

SEQ ID NO: 5941 - DNA, 50 bp, Artificial Sequence
  Description of Artificial Sequence: Synthetic probe
cctcctcacctaaaacraataaaactatatacacaataaaacaccaaaac

SEQ ID NO: 5942 - DNA, 50 bp, Artificial Sequence
  Description of Artificial Sequence: Synthetic probe
gtttttttatttgagaygagtagaattgtatgtatagtaaggtattagga

SEQ ID NO: 5943 - DNA, 50 bp, Artificial Sequence
  Description of Artificial Sequence: Synthetic probe
acatcataacttatctaactaattaaaataaatatcactatctttcctcc

SEQ ID NO: 5944 - DNA, 50 bp, Artificial Sequence
  Description of Artificial Sequence: Synthetic probe
aaaaaaaaccctttaaaacttataactccactccraaaaacraactcrcc

SEQ ID NO: 5945 - DNA, 50 bp, Artificial Sequence
  Description of Artificial Sequence: Synthetic probe
cttaatatccttctctacctactaccttaaaaccaactcaatatatccac

SEQ ID NO: 5946 - DNA, 50 bp, Artificial Sequence
  Description of Artificial Sequence: Synthetic probe
caataaacctaactaactatataaaccaacaaattactttcccccttaac

SEQ ID NO: 5947 - DNA, 50 bp, Artificial Sequence
  Description of Artificial Sequence: Synthetic probe
aaaaaaacaactaaatatcraaaacaaccaaatttcraaaacaaccaaac

SEQ ID NO: 5948 - DNA, 50 bp, Artificial Sequence
  Description of Artificial Sequence: Synthetic probe
accccaaaattccttaaaaaccaaaactaaaaccaacattataaatctcc

SEQ ID NO: 5949 - DNA, 50 bp, Artificial Sequence
  Description of Artificial Sequence: Synthetic probe
raaaattcacaaaccccactaaaacaaaccttcttctttcattctaaccc

SEQ ID NO: 5950 - DNA, 50 bp, Artificial Sequence
  Description of Artificial Sequence: Synthetic probe
attcttactcttaactcrtccactatactataaaattcaatctcattttc

SEQ ID NO: 5951 - DNA, 50 bp, Artificial Sequence
  Description of Artificial Sequence: Synthetic probe
ttttacrcrccrctaaaatccattataaaatattccraccaataaactcc

SEQ ID NO: 5952 - DNA, 50 bp, Artificial Sequence
  Description of Artificial Sequence: Synthetic probe
racraaaacraacctatcacctctaaaaaaactatacctataacrcaaac

SEQ ID NO: 5953 - DNA, 50 bp, Artificial Sequence
  Description of Artificial Sequence: Synthetic probe
aacataatccaatatctctaatatccaaataaacttccaacaaccaaatc

SEQ ID NO: 5954 - DNA, 50 bp, Artificial Sequence
  Description of Artificial Sequence: Synthetic probe
agatatggtttaatgtttttgatgtttagatagatttttagtagttaggt

SEQ ID NO: 5955 - DNA, 50 bp, Artificial Sequence
  Description of Artificial Sequence: Synthetic probe
raaaaaaaaacttctaaaaaactctaaaccaactaaaaaataaaaccttc

SEQ ID NO: 5956 - DNA, 50 bp, Artificial Sequence
  Description of Artificial Sequence: Synthetic probe
aaaatacaaaatcctttctatcccctcaccactaacttacaaactccaac

SEQ ID NO: 5957 - DNA, 50 bp, Artificial Sequence
  Description of Artificial Sequence: Synthetic probe
aacccaccaaaacaacacccaacctaactaaacctaacraaataaaaaac

SEQ ID NO: 5958 - DNA, 50 bp, Artificial Sequence
  Description of Artificial Sequence: Synthetic probe
ataattcacctaaacccaccaaaacaacacccaacctaactaaacctaac

SEQ ID NO: 5959 - DNA, 50 bp, Artificial Sequence
  Description of Artificial Sequence: Synthetic probe
crcacacrcaaataaaactaaaaataactcaaaccrtaaaaccccttttc

SEQ ID NO: 5960 - DNA, 50 bp, Artificial Sequence
  Description of Artificial Sequence: Synthetic probe
caccaaactaatataaaaccctaccctctacatacraaaaaaaactccac

SEQ ID NO: 5961 - DNA, 50 bp, Artificial Sequence
  Description of Artificial Sequence: Synthetic probe
rtatatatacrtatccrcttaaaaaaaatataaccrtcrtatatacrtcc

SEQ ID NO: 5962 - DNA, 50 bp, Artificial Sequence
  Description of Artificial Sequence: Synthetic probe
atatcraacccrtacrtatacrtaaaaatcrcrtataaccataaacacac

SEQ ID NO: 5963 - DNA, 50 bp, Artificial Sequence
  Description of Artificial Sequence: Synthetic probe
craacccrtacrtatacrtaaaaatcrcrtataaccataaacacacraac

SEQ ID NO: 5964 - DNA, 50 bp, Artificial Sequence
  Description of Artificial Sequence: Synthetic probe
ccataaacacacraacrtacacrcacraaaactacrtatactatactaac

SEQ ID NO: 5965 - DNA, 50 bp, Artificial Sequence
  Description of Artificial Sequence: Synthetic probe
craacrtacacrcacraaaactacrtatactatactaacrtaaaaaatac

SEQ ID NO: 5966 - DNA, 50 bp, Artificial Sequence
  Description of Artificial Sequence: Synthetic probe
crtacacrcacraaaactacrtatactatactaacrtaaaaaatacraac

SEQ ID NO: 5967 - DNA, 50 bp, Artificial Sequence
  Description of Artificial Sequence: Synthetic probe
raaaactacrtatactatactaacrtaaaaaatacraacraaataaccrc

SEQ ID NO: 5968 - DNA, 50 bp, Artificial Sequence
  Description of Artificial Sequence: Synthetic probe
tttctttaacttaaacaataacaattacattaatctaaataaaacttttc

SEQ ID NO: 5969 - DNA, 50 bp, Artificial Sequence
  Description of Artificial Sequence: Synthetic probe
aaggagattagaatttattatttatagttagtggttgagattttttaaga

SEQ ID NO: 5970 - DNA, 50 bp, Artificial Sequence
  Description of Artificial Sequence: Synthetic probe
aaaaaattaaaattcatcatctacaaccaataactaaaattttttaaaac

SEQ ID NO: 5971 - DNA, 50 bp, Artificial Sequence
  Description of Artificial Sequence: Synthetic probe
ctaaaataaacraaaaacaacaactaaaaataacacccaactcaccccac

SEQ ID NO: 5972 - DNA, 50 bp, Artificial Sequence
  Description of Artificial Sequence: Synthetic probe
atacatttaataccrtttaaaaccactaattcattacaaaataaatctcc

SEQ ID NO: 5973 - DNA, 50 bp, Artificial Sequence
  Description of Artificial Sequence: Synthetic probe
ccaaaaatcaaaacraaaatttattttacaataaattaataaccccaaac

SEQ ID NO: 5974 - DNA, 50 bp, Artificial Sequence
  Description of Artificial Sequence: Synthetic probe
atttcttaacattaaacatataaattaccacccataatacatttaatacc

SEQ ID NO: 5975 - DNA, 50 bp, Artificial Sequence
  Description of Artificial Sequence: Synthetic probe
gttaagagttagagyggagatttattttgtaatgaattagtggttttaaa

SEQ ID NO: 5976 - DNA, 50 bp, Artificial Sequence
  Description of Artificial Sequence: Synthetic probe
aaacccttcaaataaataaaaaactataccaaaaacccaccaacacatac

SEQ ID NO: 5977 - DNA, 50 bp, Artificial Sequence
  Description of Artificial Sequence: Synthetic probe
attttttgagggttggtaatgtatgatgtttttaaaagtatagttgtagt

SEQ ID NO: 5978 - DNA, 50 bp, Artificial Sequence
  Description of Artificial Sequence: Synthetic probe
cctcctaaaaactaacaatacataatatctccaaaaacacaattacaacc

SEQ ID NO: 5979 - DNA, 50 bp, Artificial Sequence
  Description of Artificial Sequence: Synthetic probe
taagttttttagatggatagaaagttgtgttaggagtttattagtatatg

SEQ ID NO: 5980 - DNA, 50 bp, Artificial Sequence
  Description of Artificial Sequence: Synthetic probe
actaataaactcctaacacaactttctatccatctaaaaaacttatttcc

SEQ ID NO: 5981 - DNA, 50 bp, Artificial Sequence
  Description of Artificial Sequence: Synthetic probe
ctaaaaacaaacaaaactacctcccaaaaaaaaccctaacaaatattacc

SEQ ID NO: 5982 - DNA, 50 bp, Artificial Sequence
  Description of Artificial Sequence: Synthetic probe
atccccracctatactacatatatttctaacaaacaacaaacaaatcttc

SEQ ID NO: 5983 - DNA, 50 bp, Artificial Sequence
  Description of Artificial Sequence: Synthetic probe
taataaccaaaaactaaaatatctatatataatttcaaaaacctaaaatc

SEQ ID NO: 5984 - DNA, 50 bp, Artificial Sequence
  Description of Artificial Sequence: Synthetic probe
taaaaacattctcccaatatctaaccaaaccctctaaaaactaccrcctc

SEQ ID NO: 5985 - DNA, 50 bp, Artificial Sequence
  Description of Artificial Sequence: Synthetic probe
ataatttcaaaaacctaaaatcraaaaattaaaacctaataattactacc

SEQ ID NO: 5986 - DNA, 50 bp, Artificial Sequence
  Description of Artificial Sequence: Synthetic probe
aaacataaaaacattctcccaatatctaaccaaaccctctaaaaactacc

SEQ ID NO: 5987 - DNA, 50 bp, Artificial Sequence
  Description of Artificial Sequence: Synthetic probe
ttcaaaaacctaaaatcraaaaattaaaacctaataattactaccraaac

SEQ ID NO: 5988 - DNA, 50 bp, Artificial Sequence
  Description of Artificial Sequence: Synthetic probe
aacccraaacaaaccraatataaacaccrcttctacraaaactacataac

SEQ ID NO: 5989 - DNA, 50 bp, Artificial Sequence
  Description of Artificial Sequence: Synthetic probe
cacacrtaaaatcccactacacctccctaaaaaattcacaaactaaaccc

SEQ ID NO: 5990 - DNA, 50 bp, Artificial Sequence
  Description of Artificial Sequence: Synthetic probe
cctccraacccaacttataaatcctttaaaaaaatacaataaaatcccac

SEQ ID NO: 5991 - DNA, 50 bp, Artificial Sequence
  Description of Artificial Sequence: Synthetic probe
tttaaaaaaatacaataaaatcccacrtataaatttactaaaacctctac

SEQ ID NO: 5992 - DNA, 50 bp, Artificial Sequence
  Description of Artificial Sequence: Synthetic probe
aatcccacrtataaatttactaaaacctctacrtatctctaacctacccc

SEQ ID NO: 5993 - DNA, 50 bp, Artificial Sequence
  Description of Artificial Sequence: Synthetic probe
catattccacacacrcctactaaataaacatacracctaaatttctactc

SEQ ID NO: 5994 - DNA, 50 bp, Artificial Sequence
  Description of Artificial Sequence: Synthetic probe
gtatgttttatataygtttgttgagtaagtatgyggtttaggtttttgtt

SEQ ID NO: 5995 - DNA, 50 bp, Artificial Sequence
  Description of Artificial Sequence: Synthetic probe
ctaccataaactcratacatattccacacacrcctactaaataaacatac

SEQ ID NO: 5996 - DNA, 50 bp, Artificial Sequence
  Description of Artificial Sequence: Synthetic probe
gggttagtttaaaggattggataggtttttattygagtagaaatttaggt

SEQ ID NO: 5997 - DNA, 50 bp, Artificial Sequence
  Description of Artificial Sequence: Synthetic probe
aatcaacttaaaaaactaaacaaatccctacccraacaaaaacctaaacc

SEQ ID NO: 5998 - DNA, 50 bp, Artificial Sequence
  Description of Artificial Sequence: Synthetic probe
aacactcaacaacaaaaaactaccataaactcratacatattccacacac

SEQ ID NO: 5999 - DNA, 50 bp, Artificial Sequence
  Description of Artificial Sequence: Synthetic probe
gataggtttttattygagtagaaatttaggtygtatgtttatttagtagg

SEQ ID NO: 6000 - DNA, 50 bp, Artificial Sequence
  Description of Artificial Sequence: Synthetic probe
acaaatccctacccraacaaaaacctaaaccrcatacttactcaacaaac

SEQ ID NO: 6001 - DNA, 50 bp, Artificial Sequence
  Description of Artificial Sequence: Synthetic probe
accaacrataccaacactaacactcaacaacaaaaaactaccataaactc

SEQ ID NO: 6002 - DNA, 50 bp, Artificial Sequence
  Description of Artificial Sequence: Synthetic probe
aaaaacctaaaccrcatacttactcaacaaacrtatataaaacatacacc

SEQ ID NO: 6003 - DNA, 50 bp, Artificial Sequence
  Description of Artificial Sequence: Synthetic probe
tattagyggtattagtattggtatttagtagtaaagggttgttatgggtt

SEQ ID NO: 6004 - DNA, 50 bp, Artificial Sequence
  Description of Artificial Sequence: Synthetic probe
tacaccraacccataacaaccctttactactaaataccaatactaatacc

SEQ ID NO: 6005 - DNA, 50 bp, Artificial Sequence
  Description of Artificial Sequence: Synthetic probe
ccratactattctacaataaaactccaacctaccttcataatccaccaac

SEQ ID NO: 6006 - DNA, 50 bp, Artificial Sequence
  Description of Artificial Sequence: Synthetic probe
ccrctaataaatcataaaaacaaactaaaactttactacaaaataacatc

SEQ ID NO: 6007 - DNA, 50 bp, Artificial Sequence
  Description of Artificial Sequence: Synthetic probe
ataccaaaaaacataaaacctacaaaataaatcaaaatactcttctaacc

SEQ ID NO: 6008 - DNA, 50 bp, Artificial Sequence
  Description of Artificial Sequence: Synthetic probe
tatactaaatactaaaatcrctacraaataccctaatcttaaccactacc

SEQ ID NO: 6009 - DNA, 50 bp, Artificial Sequence
  Description of Artificial Sequence: Synthetic probe
aaaatcrctacraaataccctaatcttaaccactaccrtcaaaacatatc

SEQ ID NO: 6010 - DNA, 50 bp, Artificial Sequence
  Description of Artificial Sequence: Synthetic probe
acttctcctaaacccaaaaatataatccaaactcttatattaaaaaacac

SEQ ID NO: 6011 - DNA, 50 bp, Artificial Sequence
  Description of Artificial Sequence: Synthetic probe
aaacaaaataacacttaaacttaataacaacacaaaaaacacaaaacacc

SEQ ID NO: 6012 - DNA, 50 bp, Artificial Sequence
  Description of Artificial Sequence: Synthetic probe
tcctaacacaaaaacctaaactacacctctaaacccaaaaaaaacttccc

SEQ ID NO: 6013 - DNA, 50 bp, Artificial Sequence
  Description of Artificial Sequence: Synthetic probe
aacaactcttcaatataaatacctatttacttaaaaaaccttactcctac

SEQ ID NO: 6014 - DNA, 50 bp, Artificial Sequence
  Description of Artificial Sequence: Synthetic probe
cattccccaaatataatctcttatataatctctccatttctccaacaaac

SEQ ID NO: 6015 - DNA, 50 bp, Artificial Sequence
  Description of Artificial Sequence: Synthetic probe
tattagaggataagagtagaattggatataattgaatatattgtatagat

SEQ ID NO: 6016 - DNA, 50 bp, Artificial Sequence
  Description of Artificial Sequence: Synthetic probe
aaaaaaaccaaattcacattcaaactctaaaaccttccraaaaccaacac

SEQ ID NO: 6017 - DNA, 50 bp, Artificial Sequence
  Description of Artificial Sequence: Synthetic probe
ttctactcttatcctctaataacaactacaccataataaccacctactcc

SEQ ID NO: 6018 - DNA, 50 bp, Artificial Sequence
  Description of Artificial Sequence: Synthetic probe
ctaccaaaccraaacrtcctaaacaaaaaaatatatcacratacacaaac

SEQ ID NO: 6019 - DNA, 50 bp, Artificial Sequence
  Description of Artificial Sequence: Synthetic probe
ctaacctcaaataatctacccrcctcracaataacrtcrtaaacctaaac

SEQ ID NO: 6020 - DNA, 50 bp, Artificial Sequence
  Description of Artificial Sequence: Synthetic probe
ccaaaaacttctaaaaaatctatactacccrctaaaaccaatcataaacc

SEQ ID NO: 6021 - DNA, 50 bp, Artificial Sequence
  Description of Artificial Sequence: Synthetic probe
aaaaaacccrataaacaatccttacaccctacctacaatatcraaacaac

SEQ ID NO: 6022 - DNA, 50 bp, Artificial Sequence
  Description of Artificial Sequence: Synthetic probe
aaatacactactttctaatataaaacctaattaaaaaccatcctccaccc

SEQ ID NO: 6023 - DNA, 50 bp, Artificial Sequence
  Description of Artificial Sequence: Synthetic probe
aaataaactacrctaaacrctacctttcacaaaaaaccaaaaaccccaac

SEQ ID NO: 6024 - DNA, 50 bp, Artificial Sequence
  Description of Artificial Sequence: Synthetic probe
aaaaaaacrttcttccaaactcctctctactcttaacaaccacaaaaacc

SEQ ID NO: 6025 - DNA, 50 bp, Artificial Sequence
  Description of Artificial Sequence: Synthetic probe
ccaaccccaaaaaaaaacrttcctttaataaatatcracaaataaaaacc

SEQ ID NO: 6026 - DNA, 50 bp, Artificial Sequence
  Description of Artificial Sequence: Synthetic probe
taacttctctaaaaacccaacacccaataaaaataaaaactaaatccaca

SEQ ID NO: 6027 - DNA, 50 bp, Artificial Sequence
  Description of Artificial Sequence: Synthetic probe
taaaccttcaaaccaactaaatttaacccraaactaatcttaaatacaac

SEQ ID NO: 6028 - DNA, 50 bp, Artificial Sequence
  Description of Artificial Sequence: Synthetic probe
aaaccttcaaaccaactaaatttaacccaaaactaatcttaaatacaaca

SEQ ID NO: 6029 - DNA, 50 bp, Artificial Sequence
  Description of Artificial Sequence: Synthetic probe
ctccataaaccccaacttaatttcrattctcratttaaatcttaaaatac

SEQ ID NO: 6030 - DNA, 50 bp, Artificial Sequence
  Description of Artificial Sequence: Synthetic probe
raaaacraaactctcraaaaatcccaaaaacaaactaatcctacrctaac

SEQ ID NO: 6031 - DNA, 50 bp, Artificial Sequence
  Description of Artificial Sequence: Synthetic probe
aataactaaaaatctatatacttttaaaacatacaaacaactataaacac

SEQ ID NO: 6032 - DNA, 50 bp, Artificial Sequence
  Description of Artificial Sequence: Synthetic probe
ataaaatatataaacctcaaaatctcaaaatataaatccrtactataccc

SEQ ID NO: 6033 - DNA, 50 bp, Artificial Sequence
  Description of Artificial Sequence: Synthetic probe
aaataattggggatttatgtgtttttgagatatatagataattgtgagta

SEQ ID NO: 6034 - DNA, 50 bp, Artificial Sequence
  Description of Artificial Sequence: Synthetic probe
tcacatattcttattctccactaaaaaaccatactctaataaaactttcc

SEQ ID NO: 6035 - DNA, 50 bp, Artificial Sequence
  Description of Artificial Sequence: Synthetic probe
tcaacaaccctccaaatactcraacctaaaaaaaaatcaacaataaaatc

SEQ ID NO: 6036 - DNA, 50 bp, Artificial Sequence
  Description of Artificial Sequence: Synthetic probe
ataactttccctaatactctacaacccccaaaaaatttaaaatttacccc

SEQ ID NO: 6037 - DNA, 50 bp, Artificial Sequence
  Description of Artificial Sequence: Synthetic probe
taccctctacaaccaaaaaacacaaaaccttcaactaatactaaatttac

SEQ ID NO: 6038 - DNA, 50 bp, Artificial Sequence
  Description of Artificial Sequence: Synthetic probe
tctttcrtctttaacctattcacacctaaaaataccraaaacccractcc

SEQ ID NO: 6039 - DNA, 50 bp, Artificial Sequence
  Description of Artificial Sequence: Synthetic probe
aagggagaggatttttaattatagttatagtgagattttgagtgtttttg

SEQ ID NO: 6040 - DNA, 50 bp, Artificial Sequence
  Description of Artificial Sequence: Synthetic probe
aaaaaaaaaactctcaactacaatcataataaaaccttaaatacctctac

SEQ ID NO: 6041 - DNA, 50 bp, Artificial Sequence
  Description of Artificial Sequence: Synthetic probe
cacaaattcrataaacractcraaacrtaacctccaacctacratataac

SEQ ID NO: 6042 - DNA, 50 bp, Artificial Sequence
  Description of Artificial Sequence: Synthetic probe
aaaaaacattactatacrccctttatatccrcrataaaaaaactccaatc

SEQ ID NO: 6043 - DNA, 50 bp, Artificial Sequence
  Description of Artificial Sequence: Synthetic probe
caaacccataaccctacaacaccaaaataaataaaaactttaaaccaaca

SEQ ID NO: 6044 - DNA, 50 bp, Artificial Sequence
  Description of Artificial Sequence: Synthetic probe
atataaatcaaaatcctcctaaaatcttacccattctctatcaaatcctc

SEQ ID NO: 6045 - DNA, 50 bp, Artificial Sequence
  Description of Artificial Sequence: Synthetic probe
attcatactttattttaatcctccacctaactcttatctaattttataac

SEQ ID NO: 6046 - DNA, 50 bp, Artificial Sequence
  Description of Artificial Sequence: Synthetic probe
aaattaaaaataaaaacracacaacattatactcttcrccttccctcatc

SEQ ID NO: 6047 - DNA, 50 bp, Artificial Sequence
  Description of Artificial Sequence: Synthetic probe
gttgtttaattttagygttaaatattagaagtgggttgttttgygttaga

SEQ ID NO: 6048 - DNA, 50 bp, Artificial Sequence
  Description of Artificial Sequence: Synthetic probe
ttatttaattccaacrccaaacaccaaaaataaactaccctacrccaaac

SEQ ID NO: 6049 - DNA, 50 bp, Artificial Sequence
  Description of Artificial Sequence: Synthetic probe
cacataatatacaatttctcccttcaactaatcacttacatctcaatacc

SEQ ID NO: 6050 - DNA, 50 bp, Artificial Sequence
  Description of Artificial Sequence: Synthetic probe
ctcraaattatcrtccrtaaattctaacacrtcraaaacaacracraaac

SEQ ID NO: 6051 - DNA, 50 bp, Artificial Sequence
  Description of Artificial Sequence: Synthetic probe
atacractctcraaattatcrtccrtaaattctaacacrtcraaaacaac

SEQ ID NO: 6052 - DNA, 50 bp, Artificial Sequence
  Description of Artificial Sequence: Synthetic probe
aaaattattcttattcacrtactcctttcrtttaaacaaaaatatctacc

SEQ ID NO: 6053 - DNA, 50 bp, Artificial Sequence
  Description of Artificial Sequence: Synthetic probe
aaattattcttattcacatactcctttcatttaaacaaaaatatctacca

SEQ ID NO: 6054 - DNA, 50 bp, Artificial Sequence
  Description of Artificial Sequence: Synthetic probe
aacttaacccaatataaatttcatcaaaaaattctacrcaaactttacac

SEQ ID NO: 6055 - DNA, 50 bp, Artificial Sequence
  Description of Artificial Sequence: Synthetic probe
cacatttacaaattatattaaaaatattatcattcactaaataccaactc

SEQ ID NO: 6056 - DNA, 50 bp, Artificial Sequence
  Description of Artificial Sequence: Synthetic probe
tactcccrctcaaatattatcctcaaaataaaattcacacttaccttctc

SEQ ID NO: 6057 - DNA, 50 bp, Artificial Sequence
  Description of Artificial Sequence: Synthetic probe
aaccactcttcccacataaacaacaatttatctactaaaattacaaatac

SEQ ID NO: 6058 - DNA, 50 bp, Artificial Sequence
  Description of Artificial Sequence: Synthetic probe
ctttcaactaaaaaccataataacttccaaaatctctacccctccccatc

SEQ ID NO: 6059 - DNA, 50 bp, Artificial Sequence
  Description of Artificial Sequence: Synthetic probe
ttaaaaaaacctaccctctaaaataaccataaataaaataccrccatttc

SEQ ID NO: 6060 - DNA, 50 bp, Artificial Sequence
  Description of Artificial Sequence: Synthetic probe
tcctcttctcactattcctcttaaaaaaaatctataaactccaccaccac

SEQ ID NO: 6061 - DNA, 50 bp, Artificial Sequence
  Description of Artificial Sequence: Synthetic probe
ccttaactaaatccaaaacaaatacaatccaaactctcactaaaattacc

SEQ ID NO: 6062 - DNA, 50 bp, Artificial Sequence
  Description of Artificial Sequence: Synthetic probe
craccactaataataaaaacaataactactaaaactttaaaacttccaac

SEQ ID NO: 6063 - DNA, 50 bp, Artificial Sequence
  Description of Artificial Sequence: Synthetic probe
ccaaaaatactaaataacttactaataataccccaaccaattaactactc

SEQ ID NO: 6064 - DNA, 50 bp, Artificial Sequence
  Description of Artificial Sequence: Synthetic probe
aaatcttaatcttctaaatttccrttttctcraataaaaaatacaaatcc

SEQ ID NO: 6065 - DNA, 50 bp, Artificial Sequence
  Description of Artificial Sequence: Synthetic probe
aacraaaaaacaaccttaatatacctccaacctaaaatcctaaaataaac

SEQ ID NO: 6066 - DNA, 50 bp, Artificial Sequence
  Description of Artificial Sequence: Synthetic probe
aaaaaacaaccttaatatacctccaacctaaaatcctaaaataaacrccc

SEQ ID NO: 6067 - DNA, 50 bp, Artificial Sequence
  Description of Artificial Sequence: Synthetic probe
ctaaataaatttactatctatacatcracrccctccratctaaaatacrc

SEQ ID NO: 6068 - DNA, 50 bp, Artificial Sequence
  Description of Artificial Sequence: Synthetic probe
aactaaataaatttactatctatacatcracrccctccratctaaaatac

SEQ ID NO: 6069 - DNA, 50 bp, Artificial Sequence
  Description of Artificial Sequence: Synthetic probe
ctccaacctaaaatcctaaaataaacrcccratatcccaaactaaaacrc

SEQ ID NO: 6070 - DNA, 50 bp, Artificial Sequence
  Description of Artificial Sequence: Synthetic probe
aaacatacactaaactaaataaatttactatctatacatcracrccctcc

SEQ ID NO: 6071 - DNA, 50 bp, Artificial Sequence
  Description of Artificial Sequence: Synthetic probe
tttaaaaaaacatacactaaactaaataaatttactatctatacatcrac

SEQ ID NO: 6072 - DNA, 50 bp, Artificial Sequence
  Description of Artificial Sequence: Synthetic probe
atatttaaaaaaacatacactaaactaaataaatttactatctatacatc

SEQ ID NO: 6073 - DNA, 50 bp, Artificial Sequence
  Description of Artificial Sequence: Synthetic probe
tacraaccttatcctaattaactaaacacrcrtttaatataaataaaaac

SEQ ID NO: 6074 - DNA, 50 bp, Artificial Sequence
  Description of Artificial Sequence: Synthetic probe
tcctaattaactaaacacrcrtttaatataaataaaaacrtcrcrctaac

SEQ ID NO: 6075 - DNA, 50 bp, Artificial Sequence
  Description of Artificial Sequence: Synthetic probe
ccacraaacraaacatctcracccraatactatcaacttcaaaaataccc

SEQ ID NO: 6076 - DNA, 50 bp, Artificial Sequence
  Description of Artificial Sequence: Synthetic probe
tataaataaaaacrtcrcrctaacraacattcctaaaactaacaacattc

SEQ ID NO: 6077 - DNA, 50 bp, Artificial Sequence
  Description of Artificial Sequence: Synthetic probe
ataaaaacrtcrcrctaacraacattcctaaaactaacaacattcraacc

SEQ ID NO: 6078 - DNA, 50 bp, Artificial Sequence
  Description of Artificial Sequence: Synthetic probe
taacraacattcctaaaactaacaacattcraaccraaatatctcrctcc

SEQ ID NO: 6079 - DNA, 50 bp, Artificial Sequence
  Description of Artificial Sequence: Synthetic probe
aatttataaacrcrtaaaaaaacrcttaaaatctaaaaaaaacrtcrccc

SEQ ID NO: 6080 - DNA, 50 bp, Artificial Sequence
  Description of Artificial Sequence: Synthetic probe
ttatagttttttagtttaagggaagtagagtygtagtagataggtttatt

SEQ ID NO: 6081 - DNA, 50 bp, Artificial Sequence
  Description of Artificial Sequence: Synthetic probe
aaacrcttaaaatctaaaaaaaacrtcrcccraataaacctatctactac

SEQ ID NO: 6082 - DNA, 50 bp, Artificial Sequence
  Description of Artificial Sequence: Synthetic probe
acratataaccccacataaacccaaaaatactaaaacatacraacttaac

SEQ ID NO: 6083 - DNA, 50 bp, Artificial Sequence
  Description of Artificial Sequence: Synthetic probe
cractctacttcccttaaactaaaaaactataaacttcrtctaaacrccc

SEQ ID NO: 6084 - DNA, 50 bp, Artificial Sequence
  Description of Artificial Sequence: Synthetic probe
ttcccttaaactaaaaaactataaacttcrtctaaacrcccrctaaattc

SEQ ID NO: 6085 - DNA, 50 bp, Artificial Sequence
  Description of Artificial Sequence: Synthetic probe
ttcctccccacratataaccccacataaacccaaaaatactaaaacatac

SEQ ID NO: 6086 - DNA, 50 bp, Artificial Sequence
  Description of Artificial Sequence: Synthetic probe
aattattcraaaccrctttatatcacaaccaaacattctacaaacrtcrc

SEQ ID NO: 6087 - DNA, 50 bp, Artificial Sequence
  Description of Artificial Sequence: Synthetic probe
ttaattattcraaaccrctttatatcacaaccaaacattctacaaacrtc

SEQ ID NO: 6088 - DNA, 50 bp, Artificial Sequence
  Description of Artificial Sequence: Synthetic probe
aaattaattattcraaaccrctttatatcacaaccaaacattctacaaac

SEQ ID NO: 6089 - DNA, 50 bp, Artificial Sequence
  Description of Artificial Sequence: Synthetic probe
aaaaaaaacaacacrcracrtttataaaatacttaactataatacaaaac

SEQ ID NO: 6090 - DNA, 50 bp, Artificial Sequence
  Description of Artificial Sequence: Synthetic probe
aataacrcaaaacacataaaatccttaacacacaaaaaaatatcaataac

SEQ ID NO: 6091 - DNA, 50 bp, Artificial Sequence
  Description of Artificial Sequence: Synthetic probe
cttatttattcccatcacatatcacttttaaaaaattataaaaactaccc

SEQ ID NO: 6092 - DNA, 50 bp, Artificial Sequence
  Description of Artificial Sequence: Synthetic probe
ctacccrttattaacatctttctatataccaaaaactttatatactttac

SEQ ID NO: 6093 - DNA, 50 bp, Artificial Sequence
  Description of Artificial Sequence: Synthetic probe
tttttcttaaaaaaaaatacacraattacaaccaaaaaacatacrctccc

SEQ ID NO: 6094 - DNA, 50 bp, Artificial Sequence
  Description of Artificial Sequence: Synthetic probe
ggataaatggtagtaatygagattgaagttaagtttaattagggtttttg

SEQ ID NO: 6095 - DNA, 50 bp, Artificial Sequence
  Description of Artificial Sequence: Synthetic probe
taacaacaatcraaattaaaatcaaacctaaccaaaacttttacraaaac

SEQ ID NO: 6096 - DNA, 50 bp, Artificial Sequence
  Description of Artificial Sequence: Synthetic probe
caaacctaaccaaaacttttacraaaacrcataccttttaactataattc

SEQ ID NO: 6097 - DNA, 50 bp, Artificial Sequence
  Description of Artificial Sequence: Synthetic probe
ttaagtttaattagggtttttgygggagygtatgttttttggttgtaatt

SEQ ID NO: 6098 - DNA, 50 bp, Artificial Sequence
  Description of Artificial Sequence: Synthetic probe
ttaaaaaaaacrcctaccttctacrtaaaattctccaaaacaaactaaac

SEQ ID NO: 6099 - DNA, 50 bp, Artificial Sequence
  Description of Artificial Sequence: Synthetic probe
aaagagttaaagaggaagttttttgtaygaaaagattatagggtttatgt

SEQ ID NO: 6100 - DNA, 50 bp, Artificial Sequence
  Description of Artificial Sequence: Synthetic probe
tttaactctttacctaattatttccaaaatatactatacctcttactttc

SEQ ID NO: 6101 - DNA, 50 bp, Artificial Sequence
  Description of Artificial Sequence: Synthetic probe
ttatattcaaattaaatacaattttctcataatcaaaacattctactttc

SEQ ID NO: 6102 - DNA, 50 bp, Artificial Sequence
  Description of Artificial Sequence: Synthetic probe
cctaacaatacactaaacrcrctcaccttttcctctaacaaaacataatc

SEQ ID NO: 6103 - DNA, 50 bp, Artificial Sequence
  Description of Artificial Sequence: Synthetic probe
ggattagagtatagatttattttgtttggaattttttgtttgagggaagg

SEQ ID NO: 6104 - DNA, 50 bp, Artificial Sequence
  Description of Artificial Sequence: Synthetic probe
aatcaaaacacaaattcatcctacctaaaactctctatttaaaaaaaaac

SEQ ID NO: 6105 - DNA, 50 bp, Artificial Sequence
  Description of Artificial Sequence: Synthetic probe
tccactttttcaattctctctccattcttcaataaatcaacttcaatatc

SEQ ID NO: 6106 - DNA, 50 bp, Artificial Sequence
  Description of Artificial Sequence: Synthetic probe
ataaaaaatcaaatttcctaaattactatatatctaaatttcatccatcc

SEQ ID NO: 6107 - DNA, 50 bp, Artificial Sequence
  Description of Artificial Sequence: Synthetic probe
agygygtttagtgtattgttaggtatttagaaagtgtttaagatttttgg

SEQ ID NO: 6108 - DNA, 50 bp, Artificial Sequence
  Description of Artificial Sequence: Synthetic probe
acrcrcttaatatattaccaaatacttaaaaaatactcaaaatctctaac

SEQ ID NO: 6109 - DNA, 50 bp, Artificial Sequence
  Description of Artificial Sequence: Synthetic probe
tattctatcccatttaccataatcctcacctatccctattatattttatc

SEQ ID NO: 6110 - DNA, 50 bp, Artificial Sequence
  Description of Artificial Sequence: Synthetic probe
ctaaatacatacaaaaactaacaaataccttaaataattaaattaaaccc

SEQ ID NO: 6111 - DNA, 50 bp, Artificial Sequence
  Description of Artificial Sequence: Synthetic probe
aataaacttccaccttcccaacaaaccacctccattttaaaaaataaacc

SEQ ID NO: 6112 - DNA, 50 bp, Artificial Sequence
  Description of Artificial Sequence: Synthetic probe
taacttaatatcaaactatatcaaacaccaaatatttacatttaatcatc

SEQ ID NO: 6113 - DNA, 50 bp, Artificial Sequence
  Description of Artificial Sequence: Synthetic probe
caaattaaccccaaataaaataccctaacaatattaatatatcttttccc

SEQ ID NO: 6114 - DNA, 50 bp, Artificial Sequence
  Description of Artificial Sequence: Synthetic probe
ttaaatttaaccractaaaaaccttccaaactatacaaataaataaatcc

SEQ ID NO: 6115 - DNA, 50 bp, Artificial Sequence
  Description of Artificial Sequence: Synthetic probe
tattccaccaaaaaaatttcattaactttcatccaattaaatattttacc

SEQ ID NO: 6116 - DNA, 50 bp, Artificial Sequence
  Description of Artificial Sequence: Synthetic probe
actaacccaactctaattttcraaaaatcaaataaccttttccctcccrc

SEQ ID NO: 6117 - DNA, 50 bp, Artificial Sequence
  Description of Artificial Sequence: Synthetic probe
ttactacatttttacaataaactatataataacctccatccaacccacca

SEQ ID NO: 6118 - DNA, 50 bp, Artificial Sequence
  Description of Artificial Sequence: Synthetic probe
tactcraaccatttacacaaatactttaacctacttaacttttcaaatac

SEQ ID NO: 6119 - DNA, 50 bp, Artificial Sequence
  Description of Artificial Sequence: Synthetic probe
atctaataaatacctatccctataaaaataaacctccaccccccaaacca

SEQ ID NO: 6120 - DNA, 50 bp, Artificial Sequence
  Description of Artificial Sequence: Synthetic probe
tacattttcttaataacaattacacaccccrcacattatacatttaaaac

SEQ ID NO: 6121 - DNA, 50 bp, Artificial Sequence
  Description of Artificial Sequence: Synthetic probe
tataaaataaaaatattttaaaaacactacctattctcccctatcrccac

SEQ ID NO: 6122 - DNA, 50 bp, Artificial Sequence
  Description of Artificial Sequence: Synthetic probe
actcaaaacctaaaccaatacctaacaaccaaaaaaaaccaacaatatac

SEQ ID NO: 6123 - DNA, 50 bp, Artificial Sequence
  Description of Artificial Sequence: Synthetic probe
rtaccatccrtttatttaacttaaaaccttcctactatcctcrcctatac

SEQ ID NO: 6124 - DNA, 50 bp, Artificial Sequence
  Description of Artificial Sequence: Synthetic probe
aataacctcraataaccaaacttatttcctcctcrataaatataaaatac

SEQ ID NO: 6125 - DNA, 50 bp, Artificial Sequence
  Description of Artificial Sequence: Synthetic probe
caaccttcttcrccttctcctcractataaaaccctaataaaaaatctac

SEQ ID NO: 6126 - DNA, 50 bp, Artificial Sequence
  Description of Artificial Sequence: Synthetic probe
crttttactaacattctaaacattcrccracrtcrtcataataaccraac

SEQ ID NO: 6127 - DNA, 50 bp, Artificial Sequence
  Description of Artificial Sequence: Synthetic probe
cctaccacacrtaaactaatacatacacatctaaactaatttccaaaatc

SEQ ID NO: 6128 - DNA, 50 bp, Artificial Sequence
  Description of Artificial Sequence: Synthetic probe
ttttgttataygtggattggtgtatgtatatttgggttgatttttaagat

SEQ ID NO: 6129 - DNA, 50 bp, Artificial Sequence
  Description of Artificial Sequence: Synthetic probe
aaacraatataaattaaactactcaatctcraaacaattcaaaaacaacc

SEQ ID NO: 6130 - DNA, 50 bp, Artificial Sequence
  Description of Artificial Sequence: Synthetic probe
tatttttagtttygtattttgttygttgtttattttgtgagtagtttygg

SEQ ID NO: 6131 - DNA, 50 bp, Artificial Sequence
  Description of Artificial Sequence: Synthetic probe
cttttttccccactaactctaaacctcaaaactatactacctatattcac

SEQ ID NO: 6132 - DNA, 50 bp, Artificial Sequence
  Description of Artificial Sequence: Synthetic probe
cttaccraactactttctaaaataaaaataccttcttcatatataccctc

SEQ ID NO: 6133 - DNA, 50 bp, Artificial Sequence
  Description of Artificial Sequence: Synthetic probe
aaaatataacttaaataccacaacttccratacrcctttctttacaattc

SEQ ID NO: 6134 - DNA, 50 bp, Artificial Sequence
  Description of Artificial Sequence: Synthetic probe
crtatctcaacacactaccctctaaaaaatcaattctccccaaaatcccc

SEQ ID NO: 6135 - DNA, 50 bp, Artificial Sequence
  Description of Artificial Sequence: Synthetic probe
ataaaacraaacaaaaactataaataaaaaacccctataaatcctcrctc

SEQ ID NO: 6136 - DNA, 50 bp, Artificial Sequence
  Description of Artificial Sequence: Synthetic probe
crcaataacrtctaaatttaaacccactaaatacrtcraaacatctccrc

SEQ ID NO: 6137 - DNA, 50 bp, Artificial Sequence
  Description of Artificial Sequence: Synthetic probe
aaattaaaattaaacctacattactatatatttctcctctcctactcccc

SEQ ID NO: 6138 - DNA, 50 bp, Artificial Sequence
  Description of Artificial Sequence: Synthetic probe
aaaccctatcatcatcctttctaatctatttctaaattaaaacaaaatac

SEQ ID NO: 6139 - DNA, 50 bp, Artificial Sequence
  Description of Artificial Sequence: Synthetic probe
tcaaacttaaaccatcrcaaccactatactaactcctatatacccattcc

SEQ ID NO: 6140 - DNA, 50 bp, Artificial Sequence
  Description of Artificial Sequence: Synthetic probe
ttccaaataacctcactaaatcaacrccccracttcaaacttaaaccatc

SEQ ID NO: 6141 - DNA, 50 bp, Artificial Sequence
  Description of Artificial Sequence: Synthetic probe
aattaaaacaaaatacraaataaatacacaaaaaccaacacaataattac

SEQ ID NO: 6142 - DNA, 50 bp, Artificial Sequence
  Description of Artificial Sequence: Synthetic probe
acacaaaaaccaacacaataattacrataatttaaatttaaaaccraaac

SEQ ID NO: 6143 - DNA, 50 bp, Artificial Sequence
  Description of Artificial Sequence: Synthetic probe
atacccctttccccttaccaactaaaaatctaacatacttttccattaac

SEQ ID NO: 6144 - DNA, 50 bp, Artificial Sequence
  Description of Artificial Sequence: Synthetic probe
acaaacttactcttccattacatctacractcttaaaaaacaaaaactac

SEQ ID NO: 6145 - DNA, 50 bp, Artificial Sequence
  Description of Artificial Sequence: Synthetic probe
tcttaaaaaacaaaaactacrtataactcatctttatacrcccaactccc

SEQ ID NO: 6146 - DNA, 50 bp, Artificial Sequence
  Description of Artificial Sequence: Synthetic probe
aacaaaaactacrtataactcatctttatacrcccaactcccracaaaac

SEQ ID NO: 6147 - DNA, 50 bp, Artificial Sequence
  Description of Artificial Sequence: Synthetic probe
ttaaccacttaatattcaccccattaattacaaaaaacaaccaaccaaac

SEQ ID NO: 6148 - DNA, 50 bp, Artificial Sequence
  Description of Artificial Sequence: Synthetic probe
aaaaacaaaaaacctaaaaccrattccctctaacttcctaaaactaaatc

SEQ ID NO: 6149 - DNA, 50 bp, Artificial Sequence
  Description of Artificial Sequence: Synthetic probe
acattactaacaacrcaaaaactaaaactcctcctccraaacraaaactc

SEQ ID NO: 6150 - DNA, 50 bp, Artificial Sequence
  Description of Artificial Sequence: Synthetic probe
caccacttctaaatttcccttccccaccraaaaaacaccaaataaacatc

SEQ ID NO: 6151 - DNA, 50 bp, Artificial Sequence
  Description of Artificial Sequence: Synthetic probe
aaaaaatatataaaaaaatacaccccacratactcacctaatacttcctc

SEQ ID NO: 6152 - DNA, 50 bp, Artificial Sequence
  Description of Artificial Sequence: Synthetic probe
ctacaataacaatttcaacatccraaaaacaatacaaaaatatacraaac

SEQ ID NO: 6153 - DNA, 50 bp, Artificial Sequence
  Description of Artificial Sequence: Synthetic probe
aattactacaataacaatttcaacatccraaaaacaatacaaaaatatac

SEQ ID NO: 6154 - DNA, 50 bp, Artificial Sequence
  Description of Artificial Sequence: Synthetic probe
ccaataacacataaatataaaaaattactacaataacaatttcaacatcc

SEQ ID NO: 6155 - DNA, 50 bp, Artificial Sequence
  Description of Artificial Sequence: Synthetic probe
acttaaactcactataactactatcaaaaaacrcrcacraacaacacaac

SEQ ID NO: 6156 - DNA, 50 bp, Artificial Sequence
  Description of Artificial Sequence: Synthetic probe
tatatccacaacatctactaccraaaatattccaaaccrctatactactc

SEQ ID NO: 6157 - DNA, 50 bp, Artificial Sequence
  Description of Artificial Sequence: Synthetic probe
crctaatatcrcacttaaactcactataactactatcaaaaaacrcrcac

SEQ ID NO: 6158 - DNA, 50 bp, Artificial Sequence
  Description of Artificial Sequence: Synthetic probe
gtgtgtttatagtatttattgtygaggatgttttaagtygttgtgttgtt

SEQ ID NO: 6159 - DNA, 50 bp, Artificial Sequence
  Description of Artificial Sequence: Synthetic probe
tctacrctaatatcrcacttaaactcactataactactatcaaaaaacrc

SEQ ID NO: 6160 - DNA, 50 bp, Artificial Sequence
  Description of Artificial Sequence: Synthetic probe
tctctacrctaatatcrcacttaaactcactataactactatcaaaaaac

SEQ ID NO: 6161 - DNA, 50 bp, Artificial Sequence
  Description of Artificial Sequence: Synthetic probe
cacaacatctactaccraaaatattccaaaccrctatactactcrtacrc

SEQ ID NO: 6162 - DNA, 50 bp, Artificial Sequence
  Description of Artificial Sequence: Synthetic probe
rtcataacrtccaactcctcctatcrctactaaatctctacrctaatatc

SEQ ID NO: 6163 - DNA, 50 bp, Artificial Sequence
  Description of Artificial Sequence: Synthetic probe
crtacrcrctccttaacaacaaccacaataaactcaaatacracatcaac

SEQ ID NO: 6164 - DNA, 50 bp, Artificial Sequence
  Description of Artificial Sequence: Synthetic probe
atagtagttatagtgagtttaagtgygatattagygtagagatttagtag

SEQ ID NO: 6165 - DNA, 50 bp, Artificial Sequence
  Description of Artificial Sequence: Synthetic probe
caacaaccacaataaactcaaatacracatcaacrcaaaaatccaacaac

SEQ ID NO: 6166 - DNA, 50 bp, Artificial Sequence
  Description of Artificial Sequence: Synthetic probe
ctaaacrccataacrcaaacrctacaaaaacaaaataatacctttaacrc

SEQ ID NO: 6167 - DNA, 50 bp, Artificial Sequence
  Description of Artificial Sequence: Synthetic probe
ataacrcaaacrctacaaaaacaaaataatacctttaacrcrattcacrc

SEQ ID NO: 6168 - DNA, 50 bp, Artificial Sequence
  Description of Artificial Sequence: Synthetic probe
aaaaacaaaataatacctttaacrcrattcacrcrcaaatacacrcracc

SEQ ID NO: 6169 - DNA, 50 bp, Artificial Sequence
  Description of Artificial Sequence: Synthetic probe
acraactcaaaaacrcraactactaaaaactataaacrcrcrataccaac

SEQ ID NO: 6170 - DNA, 50 bp, Artificial Sequence
  Description of Artificial Sequence: Synthetic probe
aaaaactataaacrcrcrataccaacrcractacraaaaaataaccaatc

SEQ ID NO: 6171 - DNA, 50 bp, Artificial Sequence
  Description of Artificial Sequence: Synthetic probe
aaaaataaccaatcractaaaccrcctaaatactatactacaacrcatcc

SEQ ID NO: 6172 - DNA, 50 bp, Artificial Sequence
  Description of Artificial Sequence: Synthetic probe
tacaaaaaataaaatactacrcctcraaccaaaaaatactaaacatacac

SEQ ID NO: 6173 - DNA, 50 bp, Artificial Sequence
  Description of Artificial Sequence: Synthetic probe
aaaatactacrcctcraaccaaaaaatactaaacatacacratttcctac

SEQ ID NO: 6174 - DNA, 50 bp, Artificial Sequence
  Description of Artificial Sequence: Synthetic probe
tacrcctcraaccaaaaaatactaaacatacacratttcctacrccaaac

SEQ ID NO: 6175 - DNA, 50 bp, Artificial Sequence
  Description of Artificial Sequence: Synthetic probe
aataatctcttctaactcrccttccctaaaatacaacaaaaacacaaacc

SEQ ID NO: 6176 - DNA, 50 bp, Artificial Sequence
  Description of Artificial Sequence: Synthetic probe
taaacacccaattttcttttctatcaaataaaaataatctcttctaactc

SEQ ID NO: 6177 - DNA, 50 bp, Artificial Sequence
  Description of Artificial Sequence: Synthetic probe
caaaaaaaacacattttactaatttacaaaactctataaattaacctaac

SEQ ID NO: 6178 - DNA, 50 bp, Artificial Sequence
  Description of Artificial Sequence: Synthetic probe
ttaatttataagattttgtggattgatttagygatgatttatggggaata

SEQ ID NO: 6179 - DNA, 50 bp, Artificial Sequence
  Description of Artificial Sequence: Synthetic probe
taatttacaaaactctataaattaacctaacrataactcataaaaaacac

SEQ ID NO: 6180 - DNA, 50 bp, Artificial Sequence
  Description of Artificial Sequence: Synthetic probe
aaaaattaaaaaactacaaaactaaaaatcaaacccaatatcattttaac

SEQ ID NO: 6181 - DNA, 50 bp, Artificial Sequence
  Description of Artificial Sequence: Synthetic probe
tgaaagttgaaaaattgtaaagttgagaattagatttagtattattttgg

SEQ ID NO: 6182 - DNA, 50 bp, Artificial Sequence
  Description of Artificial Sequence: Synthetic probe
rccaaaaaaaccaaacacttcaaaaaattctcttaaaccaccratatctc

SEQ ID NO: 6183 - DNA, 50 bp, Artificial Sequence
  Description of Artificial Sequence: Synthetic probe
ygttagagggattaagtattttaggaggtttttttaagttatyggtgttt

SEQ ID NO: 6184 - DNA, 50 bp, Artificial Sequence
  Description of Artificial Sequence: Synthetic probe
taaataaacatccaaccatccccaaaaaattttcttaacccccttctacc

SEQ ID NO: 6185 - DNA, 50 bp, Artificial Sequence
  Description of Artificial Sequence: Synthetic probe
taaaaaaaatcccttatctacaaaataacctactatctaccaacctttac

SEQ ID NO: 6186 - DNA, 50 bp, Artificial Sequence
  Description of Artificial Sequence: Synthetic probe
actaatctatatctccttacctctcaaacrtccaacactaaacaaaacrc

SEQ ID NO: 6187 - DNA, 50 bp, Artificial Sequence
  Description of Artificial Sequence: Synthetic probe
aaaaaaatcccttatctacaaaataacctactatctaccaacctttacrc

SEQ ID NO: 6188 - DNA, 50 bp, Artificial Sequence
  Description of Artificial Sequence: Synthetic probe
aaactaatctatatctccttacctctcaaacrtccaacactaaacaaaac

SEQ ID NO: 6189 - DNA, 50 bp, Artificial Sequence
  Description of Artificial Sequence: Synthetic probe
aaaataacctactatctaccaacctttacrcrccctacctaatattaaac

SEQ ID NO: 6190 - DNA, 50 bp, Artificial Sequence
  Description of Artificial Sequence: Synthetic probe
tctaactccttaaaatcaaaaactaatctatatctccttacctctcaaac

SEQ ID NO: 6191 - DNA, 50 bp, Artificial Sequence
  Description of Artificial Sequence: Synthetic probe
tctcccraatttaaattacaaaactaaacactatctcattctccaactac

SEQ ID NO: 6192 - DNA, 50 bp, Artificial Sequence
  Description of Artificial Sequence: Synthetic probe
cttcacrtaactaaaaaataaaacaatactcaactctacaatccaaatcc

SEQ ID NO: 6193 - DNA, 50 bp, Artificial Sequence
  Description of Artificial Sequence: Synthetic probe
tattttaaaaacccccctattccaactaatacacaactactacatctccc

SEQ ID NO: 6194 - DNA, 50 bp, Artificial Sequence
  Description of Artificial Sequence: Synthetic probe
tcactatatataaaaaatcaataaaccrataataataactttataattac

SEQ ID NO: 6195 - DNA, 50 bp, Artificial Sequence
  Description of Artificial Sequence: Synthetic probe
cccaaatatacctctctccatctctaaaccaacaacaaaactaaatatac

SEQ ID NO: 6196 - DNA, 50 bp, Artificial Sequence
  Description of Artificial Sequence: Synthetic probe
cataaataaaccttaaatatattacattaaataaaaaacaccaaccaaac

SEQ ID NO: 6197 - DNA, 50 bp, Artificial Sequence
  Description of Artificial Sequence: Synthetic probe
caatttcaactcaataaaaaaattttctcactattaaaaaaactactttc

SEQ ID NO: 6198 - DNA, 50 bp, Artificial Sequence
  Description of Artificial Sequence: Synthetic probe
ttaaccctacttaaacacacacctccaaaaacaaaatactcactactaac

SEQ ID NO: 6199 - DNA, 50 bp, Artificial Sequence
  Description of Artificial Sequence: Synthetic probe
atataacaatcttaaatacaaataacattttcataccaaaatataatacc

SEQ ID NO: 6200 - DNA, 50 bp, Artificial Sequence
  Description of Artificial Sequence: Synthetic probe
acctaaacaaatcaaatacattctaactcaacacaacaaatctaacaatc

SEQ ID NO: 6201 - DNA, 50 bp, Artificial Sequence
  Description of Artificial Sequence: Synthetic probe
aatataattacaataccaatccaaccacttcctctaaacatacttaaaac

SEQ ID NO: 6202 - DNA, 50 bp, Artificial Sequence
  Description of Artificial Sequence: Synthetic probe
acaaatatatccaaattacatatatatcctaaaaaaatcctaactctcac

SEQ ID NO: 6203 - DNA, 50 bp, Artificial Sequence
  Description of Artificial Sequence: Synthetic probe
ttaataaacattatttctttaaatacaaaactatattcaaactaaacctc

SEQ ID NO: 6204 - DNA, 50 bp, Artificial Sequence
  Description of Artificial Sequence: Synthetic probe
tctcccctactccrccttaaactccaacatcacaactaaaaaatactaac

SEQ ID NO: 6205 - DNA, 50 bp, Artificial Sequence
  Description of Artificial Sequence: Synthetic probe
tgatggttttgttggtaaatttgagttttttagaaagttttgtttaaatg

SEQ ID NO: 6206 - DNA, 50 bp, Artificial Sequence
  Description of Artificial Sequence: Synthetic probe
aataaccctactaacaaacctaaatctttcaaaaaatcttatttaaatac

SEQ ID NO: 6207 - DNA, 50 bp, Artificial Sequence
  Description of Artificial Sequence: Synthetic probe
cttatttaaatacrtcaacactccccaactataatactaaaatttaaaac

SEQ ID NO: 6208 - DNA, 50 bp, Artificial Sequence
  Description of Artificial Sequence: Synthetic probe
ccttccattatcccraaaccaaaaaaatatcctttatcctaaacttactc

SEQ ID NO: 6209 - DNA, 50 bp, Artificial Sequence
  Description of Artificial Sequence: Synthetic probe
ggtgtttttttattaaaggagatagtagaggttttttagagaaggtagtt

SEQ ID NO: 6210 - DNA, 50 bp, Artificial Sequence
  Description of Artificial Sequence: Synthetic probe
tcatttataacaaccactaaaacctcrtttttaaaaccttccattatccc

SEQ ID NO: 6211 - DNA, 50 bp, Artificial Sequence
  Description of Artificial Sequence: Synthetic probe
tagagaaggtagttygagtaagtttaggataaaggatatttttttggttt

SEQ ID NO: 6212 - DNA, 50 bp, Artificial Sequence
  Description of Artificial Sequence: Synthetic probe
aaaaaaaacaactcraataaatttaaaacaaaaaacatttccctaacccc

SEQ ID NO: 6213 - DNA, 50 bp, Artificial Sequence
  Description of Artificial Sequence: Synthetic probe
acccctcccatcrttacaacaaaatcatttataacaaccactaaaacctc

SEQ ID NO: 6214 - DNA, 50 bp, Artificial Sequence
  Description of Artificial Sequence: Synthetic probe
aactctaaaaacraaattctaataactaccataaataaccctactataac

SEQ ID NO: 6215 - DNA, 50 bp, Artificial Sequence
  Description of Artificial Sequence: Synthetic probe
aggttttaaaaaygaggttttagtggttgttataaatgattttgttgtaa

SEQ ID NO: 6216 - DNA, 50 bp, Artificial Sequence
  Description of Artificial Sequence: Synthetic probe
tactataactctccaaaaaactctcctcttaaaaaaacaaatctaaaaac

SEQ ID NO: 6217 - DNA, 50 bp, Artificial Sequence
  Description of Artificial Sequence: Synthetic probe
tacccctttatattcctaaatacctccacaaaactcraaacaatatcctc

SEQ ID NO: 6218 - DNA, 50 bp, Artificial Sequence
  Description of Artificial Sequence: Synthetic probe
aacccaactaaaaatacccctttatattcctaaatacctccacaaaactc

SEQ ID NO: 6219 - DNA, 50 bp, Artificial Sequence
  Description of Artificial Sequence: Synthetic probe
aacaaatctaaaaacraaaaaactaattctaaaaccraaaacattacccc

SEQ ID NO: 6220 - DNA, 50 bp, Artificial Sequence
  Description of Artificial Sequence: Synthetic probe
aaacrtcttcctaacttataactaaataactaaaaactccaccttctccc

SEQ ID NO: 6221 - DNA, 50 bp, Artificial Sequence
  Description of Artificial Sequence: Synthetic probe
ttgttgtttagtgaagtttggagagaggaaataattggatttttttaaag

SEQ ID NO: 6222 - DNA, 50 bp, Artificial Sequence
  Description of Artificial Sequence: Synthetic probe
atcttcaaataaaaaaccccttcataacaaaaaaatataataaaatctac

SEQ ID NO: 6223 - DNA, 50 bp, Artificial Sequence
  Description of Artificial Sequence: Synthetic probe
cctataaacrccratacatcctcccaaaacrtaataaaaatctccaaatc

SEQ ID NO: 6224 - DNA, 50 bp, Artificial Sequence
  Description of Artificial Sequence: Synthetic probe
aacctaaaaatttaaaaactactaattactaaaaaactctacaatttccc

SEQ ID NO: 6225 - DNA, 50 bp, Artificial Sequence
  Description of Artificial Sequence: Synthetic probe
aacctcraaaatcraacraatacaaactccataaaccccaacttaatttc

SEQ ID NO: 6226 - DNA, 50 bp, Artificial Sequence
  Description of Artificial Sequence: Synthetic probe
cccactacctattaacaaaattacaaaataccactactctataaaataac

SEQ ID NO: 6227 - DNA, 50 bp, Artificial Sequence
  Description of Artificial Sequence: Synthetic probe
cattaactacttatactttcatcattacaatacaattaacttcaaaaatc

SEQ ID NO: 6228 - DNA, 50 bp, Artificial Sequence
  Description of Artificial Sequence: Synthetic probe
attaactacttatactttcatcattacaatacaattaacttcaaaaatca

SEQ ID NO: 6229 - DNA, 50 bp, Artificial Sequence
  Description of Artificial Sequence: Synthetic probe
aatcaacttattaaaaaactttaaatacttaaaattctacaacatctctc

SEQ ID NO: 6230 - DNA, 50 bp, Artificial Sequence
  Description of Artificial Sequence: Synthetic probe
atcaacttattaaaaaactttaaatacttaaaattctacaacatctctca

SEQ ID NO: 6231 - DNA, 50 bp, Artificial Sequence
  Description of Artificial Sequence: Synthetic probe
tttttaaacttaaaacacaaactaaactaaacacacttaatattaactcc

SEQ ID NO: 6232 - DNA, 50 bp, Artificial Sequence
  Description of Artificial Sequence: Synthetic probe
craaaaactttcaattttatttccttacctacaaaaaacraaactcaacc

SEQ ID NO: 6233 - DNA, 50 bp, Artificial Sequence
  Description of Artificial Sequence: Synthetic probe
aacraaacacaacraaaaaccaccraaaacraaaaccaaatataacrttc

SEQ ID NO: 6234 - DNA, 50 bp, Artificial Sequence
  Description of Artificial Sequence: Synthetic probe
aatttcatctcttcctaaactaaataataaacttcccaaataacctcttc

SEQ ID NO: 6235 - DNA, 50 bp, Artificial Sequence
  Description of Artificial Sequence: Synthetic probe
caactatctcacttctaaaccttttataccctaaaaacccataatccccc

SEQ ID NO: 6236 - DNA, 50 bp, Artificial Sequence
  Description of Artificial Sequence: Synthetic probe
ccaaacractattcracaaactccctttccttaacaaccttatcctaatc

SEQ ID NO: 6237 - DNA, 50 bp, Artificial Sequence
  Description of Artificial Sequence: Synthetic probe
ttaactccataaaacaatataaactaactacatacaacacaccactaaac

SEQ ID NO: 6238 - DNA, 50 bp, Artificial Sequence
  Description of Artificial Sequence: Synthetic probe
gttggttttatgaggtagtatgagttagttgtatgtagtatattattgga

SEQ ID NO: 6239 - DNA, 50 bp, Artificial Sequence
  Description of Artificial Sequence: Synthetic probe
ataactactaaaactatatataaaaacctatcttcaacaatccctccccc

SEQ ID NO: 6240 - DNA, 50 bp, Artificial Sequence
  Description of Artificial Sequence: Synthetic probe
tatttccaacraatacccraacctaaaaatacctcttactataacccatc

SEQ ID NO: 6241 - DNA, 50 bp, Artificial Sequence
  Description of Artificial Sequence: Synthetic probe
aaaataatttaaaaaaccrccrcctccatctttaaaatcctcttaaaaac

SEQ ID NO: 6242 - DNA, 50 bp, Artificial Sequence
  Description of Artificial Sequence: Synthetic probe
rataaaaaaaaaactcaatcctcccaaataccrcrcrcaaaaaaaaacac

SEQ ID NO: 6243 - DNA, 50 bp, Artificial Sequence
  Description of Artificial Sequence: Synthetic probe
tacaaccaaaacraaactaataaataaacccraccraaaacrcaaatcac

SEQ ID NO: 6244 - DNA, 50 bp, Artificial Sequence
  Description of Artificial Sequence: Synthetic probe
tccraaaactctaaaaaacccraacratccrtaacraataaaaaataatc

SEQ ID NO: 6245 - DNA, 50 bp, Artificial Sequence
  Description of Artificial Sequence: Synthetic probe
ttacrcctacrctatatatattcctaatctacracaaccatactaaactc

SEQ ID NO: 6246 - DNA, 50 bp, Artificial Sequence
  Description of Artificial Sequence: Synthetic probe
tctacatctctacccctactatacaataaatttactaacatttaccctcc

SEQ ID NO: 6247 - DNA, 50 bp, Artificial Sequence
  Description of Artificial Sequence: Synthetic probe
tactaactaaaaaaaaccrctacracrttccactatcacrtaaaaaaacc

SEQ ID NO: 6248 - DNA, 50 bp, Artificial Sequence
  Description of Artificial Sequence: Synthetic probe
aaaactaaaacccaacctctaacacacataaataaccaaaccaaaaaaac

SEQ ID NO: 6249 - DNA, 50 bp, Artificial Sequence
  Description of Artificial Sequence: Synthetic probe
aaaactactactactcaataatttaaaaaaataactctttcctcctttcc

SEQ ID NO: 6250 - DNA, 50 bp, Artificial Sequence
  Description of Artificial Sequence: Synthetic probe
ccrataacttactcrcaaataaaaatcccctataaaataatctacaaaac

SEQ ID NO: 6251 - DNA, 50 bp, Artificial Sequence
  Description of Artificial Sequence: Synthetic probe
aaatacractacaactctaccraacaaccaaaataaactaaaaaatccrc

SEQ ID NO: 6252 - DNA, 50 bp, Artificial Sequence
  Description of Artificial Sequence: Synthetic probe
cctaaaaaactaatttctccraatacctcctcctaaacaaacaaataaac

SEQ ID NO: 6253 - DNA, 50 bp, Artificial Sequence
  Description of Artificial Sequence: Synthetic probe
acraacaaaatacraaactaaaaatacaaaaacaaacactacratcccrc

SEQ ID NO: 6254 - DNA, 50 bp, Artificial Sequence
  Description of Artificial Sequence: Synthetic probe
caacraacaaaatacraaactaaaaatacaaaaacaaacactacratccc

SEQ ID NO: 6255 - DNA, 50 bp, Artificial Sequence
  Description of Artificial Sequence: Synthetic probe
ctcraaacaattcaaaaacaaccrccraaactactcacaaaataaacaac

SEQ ID NO: 6256 - DNA, 50 bp, Artificial Sequence
  Description of Artificial Sequence: Synthetic probe
tacatctccaactccrcatcctactcrctatttattttataaacaactcc

SEQ ID NO: 6257 - DNA, 50 bp, Artificial Sequence
  Description of Artificial Sequence: Synthetic probe
ctcrctatttattttataaacaactccracractacccctaaactactcc

SEQ ID NO: 6258 - DNA, 50 bp, Artificial Sequence
  Description of Artificial Sequence: Synthetic probe
cracractacccctaaactactccraaactaaacaatttaactcacactc

SEQ ID NO: 6259 - DNA, 50 bp, Artificial Sequence
  Description of Artificial Sequence: Synthetic probe
cctaaataccraacatttaaatactacaaccactacrcraaaaccacaac

SEQ ID NO: 6260 - DNA, 50 bp, Artificial Sequence
  Description of Artificial Sequence: Synthetic probe
ttttaagtgtyggatatttaaatgttgtagttattgygyggaagttatag

SEQ ID NO: 6261 - DNA, 50 bp, Artificial Sequence
  Description of Artificial Sequence: Synthetic probe
actacacccctctccctaaataccraacatttaaatactacaaccactac

SEQ ID NO: 6262 - DNA, 50 bp, Artificial Sequence
  Description of Artificial Sequence: Synthetic probe
actaacaaacrctataacttccrcrcaataactacaacatttaaatatcc

SEQ ID NO: 6263 - DNA, 50 bp, Artificial Sequence
  Description of Artificial Sequence: Synthetic probe
aacacrcraaaatttaaacccctctaaataccraaaacaacractactcc

SEQ ID NO: 6264 - DNA, 50 bp, Artificial Sequence
  Description of Artificial Sequence: Synthetic probe
aacccacrtaaactaaaaaactaaatattaaccctcraacaactacaacc

SEQ ID NO: 6265 - DNA, 50 bp, Artificial Sequence
  Description of Artificial Sequence: Synthetic probe
aaaaaaaaacttacraacraaaaaattaaaaccrtaaacccccraccccc

SEQ ID NO: 6266 - DNA, 50 bp, Artificial Sequence
  Description of Artificial Sequence: Synthetic probe
cctacrtcraaaaaaaatctctaaatcraacaaaaaccacctcttaaccc

SEQ ID NO: 6267 - DNA, 50 bp, Artificial Sequence
  Description of Artificial Sequence: Synthetic probe
cccaaaataattaaaaaaacrcraaaacracraaaatctaaatataccrc

SEQ ID NO: 6268 - DNA, 50 bp, Artificial Sequence
  Description of Artificial Sequence: Synthetic probe
caacaacaaaaacaacaacrccaaaaaccraaaccrcaaccrcataatac

SEQ ID NO: 6269 - DNA, 50 bp, Artificial Sequence
  Description of Artificial Sequence: Synthetic probe
ctctttaaatattaaaatctaacccctacctcctccraacccaaaaatcc

SEQ ID NO: 6270 - DNA, 50 bp, Artificial Sequence
  Description of Artificial Sequence: Synthetic probe
aatccccrcttcaatcccraatttaccaatcttatctaaacttcaactcc

SEQ ID NO: 6271 - DNA, 50 bp, Artificial Sequence
  Description of Artificial Sequence: Synthetic probe
aaaatacraaactaaaatccaaacaaaactaacaaacccraaactaaaac

SEQ ID NO: 6272 - DNA, 50 bp, Artificial Sequence
  Description of Artificial Sequence: Synthetic probe
caaaaccctaaaaaattacrcrataccatcaaaatcatacaaaaattcrc

SEQ ID NO: 6273 - DNA, 50 bp, Artificial Sequence
  Description of Artificial Sequence: Synthetic probe
tatatttcctatttcatcaaaacaaaacatcratatcatctataacttcc

SEQ ID NO: 6274 - DNA, 50 bp, Artificial Sequence
  Description of Artificial Sequence: Synthetic probe
atatttcctatttcatcaaaacaaaacatcaatatcatctataacttcca

SEQ ID NO: 6275 - DNA, 50 bp, Artificial Sequence
  Description of Artificial Sequence: Synthetic probe
aaaaacaaaaaataaacataaaaaaatacaactatataccccaatacacc

SEQ ID NO: 6276 - DNA, 50 bp, Artificial Sequence
  Description of Artificial Sequence: Synthetic probe
aaaacaaaaaataaacataaaaaaatacaactatataccccaatacacca

SEQ ID NO: 6277 - DNA, 50 bp, Artificial Sequence
  Description of Artificial Sequence: Synthetic probe
atgtgttttttgttttattaggataggatatygatgttatttgtaatttt

SEQ ID NO: 6278 - DNA, 50 bp, Artificial Sequence
  Description of Artificial Sequence: Synthetic probe
tgtgttttttgttttattaggataggatattgatgttatttgtaattttt

SEQ ID NO: 6279 - DNA, 50 bp, Artificial Sequence
  Description of Artificial Sequence: Synthetic probe
acttcaataatcttactcaaatcacatccrcactaacraatttccctatc

SEQ ID NO: 6280 - DNA, 50 bp, Artificial Sequence
  Description of Artificial Sequence: Synthetic probe
cctttcaacaaaaacttcaataatcttactcaaatcacatccrcactaac

SEQ ID NO: 6281 - DNA, 50 bp, Artificial Sequence
  Description of Artificial Sequence: Synthetic probe
tttaggttttaygttttatgtttagaygtttagygagtggttttagggat

SEQ ID NO: 6282 - DNA, 50 bp, Artificial Sequence
  Description of Artificial Sequence: Synthetic probe
ttaaatctcacrtttcatacttaaacrctcaacraataactttaaaaacc

SEQ ID NO: 6283 - DNA, 50 bp, Artificial Sequence; identical to SEQ ID NO: 6282
  Description of Artificial Sequence: Synthetic probe

SEQ ID NO: 6284 - DNA, 50 bp, Artificial Sequence
  Description of Artificial Sequence: Synthetic probe
taaatctcacatttcatacttaaacactcaacaaataactttaaaaacca

SEQ ID NO: 6285 - DNA, 50 bp, Artificial Sequence
  Description of Artificial Sequence: Synthetic probe
agggtaggtttataggtaaygatttggtgaattgaaaagtaaattttttt

SEQ ID NO: 6286 - DNA, 50 bp, Artificial Sequence
  Description of Artificial Sequence: Synthetic probe
gggtaggtttataggtaatgatttggtgaattgaaaagtaaatttttttt

SEQ ID NO: 6287 - DNA, 50 bp, Artificial Sequence
  Description of Artificial Sequence: Synthetic probe
acaaaaactaacaaacractcaccrattaataaaaaactaaacttcaacc

SEQ ID NO: 6288 - DNA, 50 bp, Artificial Sequence
  Description of Artificial Sequence: Synthetic probe
aatttaaattcctttaaaattatcataaaaacacraaaactaaaccaaac

SEQ ID NO: 6289 - DNA, 50 bp, Artificial Sequence
  Description of Artificial Sequence: Synthetic probe
cattttccctctatcctttaccaaatccttaccaaactttcccaaaaatc

SEQ ID NO: 6290 - DNA, 50 bp, Artificial Sequence
  Description of Artificial Sequence: Synthetic probe
caatccccaatctattattacraataccaaacaaaataaaaatataactc

SEQ ID NO: 6291 - DNA, 50 bp, Artificial Sequence
  Description of Artificial Sequence: Synthetic probe
crctattaatctacaaaaattccctcttcttatcraacccctacraaacc

SEQ ID NO: 6292 - DNA, 50 bp, Artificial Sequence
  Description of Artificial Sequence: Synthetic probe
aaaatccacctatccrcctctaaaaccttaactccaactctattatactc

SEQ ID NO: 6293 - DNA, 50 bp, Artificial Sequence
  Description of Artificial Sequence: Synthetic probe
cctacraaactaacctataattaaccacttaacrtcactcactaaatacc

SEQ ID NO: 6294 - DNA, 50 bp, Artificial Sequence
  Description of Artificial Sequence: Synthetic probe
aatcaacaataaccatatatccccttcccaccaaatattaaaatactccc

SEQ ID NO: 6295 - DNA, 50 bp, Artificial Sequence
  Description of Artificial Sequence: Synthetic probe
ygygttttgtagattattttataggggatttttatttgygagtaagttat

SEQ ID NO: 6296 - DNA, 50 bp, Artificial Sequence
  Description of Artificial Sequence: Synthetic probe
ctaaatcacracacraattccaatcttaccataactacaacacaaacrac

SEQ ID NO: 6297 - DNA, 50 bp, Artificial Sequence
  Description of Artificial Sequence: Synthetic probe
ttatctatactcttcccraaataaatctaaatctaactcctcctaaaatc

SEQ ID NO: 6298 - DNA, 50 bp, Artificial Sequence
  Description of Artificial Sequence: Synthetic probe
tcrtccctttacacttctccatttccccttaaactctaaatataaccttc

SEQ ID NO: 6299 - DNA, 50 bp, Artificial Sequence
  Description of Artificial Sequence: Synthetic probe
taataaaataacrtcacrcctacccctcaccattactctaaccaaaattc

SEQ ID NO: 6300 - DNA, 50 bp, Artificial Sequence
  Description of Artificial Sequence: Synthetic probe
acaaaaaatttccatttccaatataactaaccaactcccatataatcaac

SEQ ID NO: 6301 - DNA, 50 bp, Artificial Sequence
  Description of Artificial Sequence: Synthetic probe
aattattttttatattctccccaaaatttataattattacctataataac

SEQ ID NO: 6302 - DNA, 50 bp, Artificial Sequence
  Description of Artificial Sequence: Synthetic probe
attttaaaaaaccataaacractattctcctacccattctataacatacc

SEQ ID NO: 6303 - DNA, 50 bp, Artificial Sequence
  Description of Artificial Sequence: Synthetic probe
tggttttagttgagagatggtaattttgagtttggaaggaaataaagtta

SEQ ID NO: 6304 - DNA, 50 bp, Artificial Sequence
  Description of Artificial Sequence: Synthetic probe
ctaatttataattctaaaaatccccaacccaattttaaaaaaccataaac

SEQ ID NO: 6305 - DNA, 50 bp, Artificial Sequence
  Description of Artificial Sequence: Synthetic probe
aactcatatacatttaaaaatctctacactaaacctaataaacacttaac

SEQ ID NO: 6306 - DNA, 50 bp, Artificial Sequence
  Description of Artificial Sequence: Synthetic probe
tgttttgtgtattagtaagttggggatagtattaataaatagttagtgtt

SEQ ID NO: 6307 - DNA, 50 bp, Artificial Sequence
  Description of Artificial Sequence: Synthetic probe
tcacaaatcctcaatctcctcctctacaaaatttcccactaaaaacaatc

SEQ ID NO: 6308 - DNA, 50 bp, Artificial Sequence
  Description of Artificial Sequence: Synthetic probe
taaatacttactaaatccaatataaaaacccttaaatacatataaacttc

SEQ ID NO: 6309 - DNA, 50 bp, Artificial Sequence
  Description of Artificial Sequence: Synthetic probe
aaacatctaaaaaaacctattaccctataaatcctctaaaaaaacatatc

SEQ ID NO: 6310 - DNA, 50 bp, Artificial Sequence
  Description of Artificial Sequence: Synthetic probe
acttaaaaaaatttcctcttttacrttataaactaaaattcctaataaac

SEQ ID NO: 6311 - DNA, 50 bp, Artificial Sequence
  Description of Artificial Sequence: Synthetic probe
ccaaaaaatatctataaaatctaaatcaacccaaaaaccaatatccatcc

SEQ ID NO: 6312 - DNA, 50 bp, Artificial Sequence
  Description of Artificial Sequence: Synthetic probe
caacccaaaaaccaatatccatccrttcatcaaaaaccccaacctacaac

SEQ ID NO: 6313 - DNA, 50 bp, Artificial Sequence
  Description of Artificial Sequence: Synthetic probe
acactaactttctccctataaaaatcaatattatttaacatcactttaac

SEQ ID NO: 6314 - DNA, 50 bp, Artificial Sequence
  Description of Artificial Sequence: Synthetic probe
agtgttaatttaaatatggtatttttgtagttagatggtttggggtgatt

SEQ ID NO: 6315 - DNA, 50 bp, Artificial Sequence
  Description of Artificial Sequence: Synthetic probe
atattaacccaaatataatacccttataatcaaataatttaaaataaccc

SEQ ID NO: 6316 - DNA, 50 bp, Artificial Sequence
  Description of Artificial Sequence: Synthetic probe
taatacataattcatactccaaacacctaactaacctaaaatctccctcc

SEQ ID NO: 6317 - DNA, 50 bp, Artificial Sequence
  Description of Artificial Sequence: Synthetic probe
ggagattttaggttagttaggtgtttggagtatgaattatgtattagtat

SEQ ID NO: 6318 - DNA, 50 bp, Artificial Sequence
  Description of Artificial Sequence: Synthetic probe
aaaacttcaaatcaaccaaatatctaaaatataaaccatatatcaacacc

SEQ ID NO: 6319 - DNA, 50 bp, Artificial Sequence
  Description of Artificial Sequence: Synthetic probe
aaaatataaaccatatatcaacaccraaaaattctaaaaatcaaactttc

SEQ ID NO: 6320 - DNA, 50 bp, Artificial Sequence
  Description of Artificial Sequence: Synthetic probe
actataaaccraaccaaaccaacatactaaaaattaataacacactaccc

SEQ ID NO: 6321 - DNA, 50 bp, Artificial Sequence
  Description of Artificial Sequence: Synthetic probe
tggagtatgaattatgtattagtatygaaaggttttagaagttagatttt

SEQ ID NO: 6322 - DNA, 50 bp, Artificial Sequence
  Description of Artificial Sequence: Synthetic probe
tcaaactttcraacaatatatcactaactctcaacatactaacctaactc

SEQ ID NO: 6323 - DNA, 50 bp, Artificial Sequence
  Description of Artificial Sequence: Synthetic probe
gtattttttagtatttatttaaagggaggygagaagattttgttgtgggt

SEQ ID NO: 6324 - DNA, 50 bp, Artificial Sequence
  Description of Artificial Sequence: Synthetic probe
cactaactctcaacatactaacctaactcracccacaacaaaatcttctc

SEQ ID NO: 6325 - DNA, 50 bp, Artificial Sequence
  Description of Artificial Sequence: Synthetic probe
tagaggtttygttttgtagaggtattttttagtatttatttaaagggagg

SEQ ID NO: 6326 - DNA, 50 bp, Artificial Sequence
  Description of Artificial Sequence: Synthetic probe
aaaaatcccrtcctacaaaaacacccctcaatatttacccaaaaaaaaac

SEQ ID NO: 6327 - DNA, 50 bp, Artificial Sequence
  Description of Artificial Sequence: Synthetic probe
tcaaccttaaaatataactattaaaccctcaacaactaaaaaaaactaac

SEQ ID NO: 6328 - DNA, 50 bp, Artificial Sequence
  Description of Artificial Sequence: Synthetic probe
aactcraaaatataaacracttcttcaaaaacacacccttcccaaccaac

SEQ ID NO: 6329 - DNA, 50 bp, Artificial Sequence
  Description of Artificial Sequence: Synthetic probe
tatagtgtagatatttggtatyggttttgaaggtagtatggtagttatat

SEQ ID NO: 6330 - DNA, 50 bp, Artificial Sequence
  Description of Artificial Sequence: Synthetic probe
acaatacaaacacctaacaccractctaaaaacaacataacaactacacc

SEQ ID NO: 6331 - DNA, 50 bp, Artificial Sequence
  Description of Artificial Sequence: Synthetic probe
tcccacaaatccattatacactccaaaaaaattaactcraaaatataaac

SEQ ID NO: 6332 - DNA, 50 bp, Artificial Sequence
  Description of Artificial Sequence: Synthetic probe
tcatacaaactttcccacaaatccattatacactccaaaaaaattaactc

SEQ ID NO: 6333 - DNA, 50 bp, Artificial Sequence
  Description of Artificial Sequence: Synthetic probe
cctaaaatatataatttactttaaacccaaaaactaataacaaatctacc

SEQ ID NO: 6334 - DNA, 50 bp, Artificial Sequence
  Description of Artificial Sequence: Synthetic probe
aactaataacaaatctaccratataattaaatacaaccttaaattactac

SEQ ID NO: 6335 - DNA, 50 bp, Artificial Sequence
  Description of Artificial Sequence: Synthetic probe
gttttatgttttggaggatttagtaggaatttaagatttttgaaaaggat

SEQ ID NO: 6336 - DNA, 50 bp, Artificial Sequence
  Description of Artificial Sequence: Synthetic probe
cccaacaaaaatccaaaacctctaaaaaaaaccracaaaactcttaccac

SEQ ID NO: 6337 - DNA, 50 bp, Artificial Sequence
  Description of Artificial Sequence: Synthetic probe
ataccttccataaataaaaaacctatattaccataaccacacccccaacc

SEQ ID NO: 6338 - DNA, 50 bp, Artificial Sequence
  Description of Artificial Sequence: Synthetic probe
atttagtaggaatttaagatttttgaaaaggatyggtagggtttttgtta

SEQ ID NO: 6339 - DNA, 50 bp, Artificial Sequence
  Description of Artificial Sequence: Synthetic probe
tcaaaaaaataaataactcaattaactcatctcaaaaaccatataccctc

SEQ ID NO: 6340 - DNA, 50 bp, Artificial Sequence
  Description of Artificial Sequence: Synthetic probe
ctctatttctctccaactcaatccaaccrtaaaaataacaaaccacctcc

SEQ ID NO: 6341 - DNA, 50 bp, Artificial Sequence
  Description of Artificial Sequence: Synthetic probe
attagaggagtgaatagtttagttagtttattttaggggttatgtgtttt

SEQ ID NO: 6342 - DNA, 50 bp, Artificial Sequence
  Description of Artificial Sequence: Synthetic probe
taactcatctcaaaaaccatataccctcraaaataatttaccactttcac

SEQ ID NO: 6343 - DNA, 50 bp, Artificial Sequence
  Description of Artificial Sequence: Synthetic probe
aaataacatcccaactacctaaaacatccaaaaaatccctacctccaatc

SEQ ID NO: 6344 - DNA, 50 bp, Artificial Sequence
  Description of Artificial Sequence: Synthetic probe
cccraaacctaaaactctccccraaataaaactaaccactataaaaaacc

SEQ ID NO: 6345 - DNA, 50 bp, Artificial Sequence
  Description of Artificial Sequence: Synthetic probe
aaaacacrtaataaccacaataaatacttaattactccacaacctaaccc

SEQ ID NO: 6346 - DNA, 50 bp, Artificial Sequence
  Description of Artificial Sequence: Synthetic probe
aataaccacaataaatacttaattactccacaacctaacccraactcaac

SEQ ID NO: 6347 - DNA, 50 bp, Artificial Sequence
  Description of Artificial Sequence: Synthetic probe
ttaatcaacctatataaccaacttcctttttaccttatcaaaaataaaac

SEQ ID NO: 6348 - DNA, 50 bp, Artificial Sequence
  Description of Artificial Sequence: Synthetic probe
tacatttcaatatacatttcaaatataaattacaaatttacactcccctc

SEQ ID NO: 6349 - DNA, 50 bp, Artificial Sequence
  Description of Artificial Sequence: Synthetic probe
ctcccctcrtatacttcaacatcctttcttttaaaaccatacaatatttc

SEQ ID NO: 6350 - DNA, 50 bp, Artificial Sequence
  Description of Artificial Sequence: Synthetic probe
tttattttattttttaactcaaacccatattatatccccatttataactc

SEQ ID NO: 6351 - DNA, 50 bp, Artificial Sequence
  Description of Artificial Sequence: Synthetic probe
cttaacttcaaaactaaataataatcttaaaaatccattttcctcccctc

SEQ ID NO: 6352 - DNA, 50 bp, Artificial Sequence
  Description of Artificial Sequence: Synthetic probe
ctatttaacccacaactttcctccctaaacctaacacataataaacaaac

SEQ ID NO: 6353 - DNA, 50 bp, Artificial Sequence
  Description of Artificial Sequence: Synthetic probe
cctcaaatatttcaccccaatcttataaaaattcttaaattaaaacattc

SEQ ID NO: 6354 - DNA, 50 bp, Artificial Sequence
  Description of Artificial Sequence: Synthetic probe
aaaaaacaataaccrcrcacratcactcraattcattccraaatattctc

SEQ ID NO: 6355 - DNA, 50 bp, Artificial Sequence
  Description of Artificial Sequence: Synthetic probe
taataaacattaaaaaacaataaccrcrcacratcactcraattcattcc

SEQ ID NO: 6356 - DNA, 50 bp, Artificial Sequence
  Description of Artificial Sequence: Synthetic probe
ttatttatttaaataaacatccttaataaacattaaaaaacaataaccrc

SEQ ID NO: 6357 - DNA, 50 bp, Artificial Sequence
  Description of Artificial Sequence: Synthetic probe
ctctttatataaaatacatttaaccatatttttaaactaaacracccttc

SEQ ID NO: 6358 - DNA, 50 bp, Artificial Sequence
  Description of Artificial Sequence: Synthetic probe
catttattaaacatttattataaaccaaaaacatactaaacccttccctc

SEQ ID NO: 6359 - DNA, 50 bp, Artificial Sequence
  Description of Artificial Sequence: Synthetic probe
gagataagagtttatagtttagagttttgaggagtaaatgagatttaggt

SEQ ID NO: 6360 - DNA, 50 bp, Artificial Sequence
  Description of Artificial Sequence: Synthetic probe
cactaacaataatcrtcaactaacatttcaaaaccccttccccaaactac

SEQ ID NO: 6361 - DNA, 50 bp, Artificial Sequence
  Description of Artificial Sequence: Synthetic probe
ataaaaaaccaattcttactcttcccaacatccacaaatacccttctccc

SEQ ID NO: 6362 - DNA, 50 bp, Artificial Sequence
  Description of Artificial Sequence: Synthetic probe
taacaataatcrtcaactaacatttcaaaaccccttccccaaactacrac

SEQ ID NO: 6363 - DNA, 50 bp, Artificial Sequence
  Description of Artificial Sequence: Synthetic probe
acatcctaatctcaataatattcaaataataacatatatatcttaacatc

SEQ ID NO: 6364 - DNA, 50 bp, Artificial Sequence
  Description of Artificial Sequence: Synthetic probe
tccaaaattcaaaaattacaaaacccccatctaatttctacactaatacc

SEQ ID NO: 6365 - DNA, 50 bp, Artificial Sequence
  Description of Artificial Sequence: Synthetic probe
tattgttgttaagtggatttaggttaaattaatttatattaygggtyggt

SEQ ID NO: 6366 - DNA, 50 bp, Artificial Sequence
  Description of Artificial Sequence: Synthetic probe
actactaccaaataaattcaaactaaatcaactcacatcacraatcracc

SEQ ID NO: 6367 - DNA, 50 bp, Artificial Sequence
  Description of Artificial Sequence: Synthetic probe
ttacactactaccaaataaattcaaactaaatcaactcacatcacraatc

SEQ ID NO: 6368 - DNA, 50 bp, Artificial Sequence
  Description of Artificial Sequence: Synthetic probe
aaattcaaaaattacaaaacccccatctaatttctacactaataccracc

SEQ ID NO: 6369 - DNA, 50 bp, Artificial Sequence
  Description of Artificial Sequence: Synthetic probe
caaatttacactactaccaaataaattcaaactaaatcaactcacatcac

SEQ ID NO: 6370 - DNA, 50 bp, Artificial Sequence
  Description of Artificial Sequence: Synthetic probe
caaaaattacaaaacccccatctaatttctacactaataccraccraccc

SEQ ID NO: 6371 - DNA, 50 bp, Artificial Sequence
  Description of Artificial Sequence: Synthetic probe
aaaattctaaaactaaatcataacaaaatcataaccctaaaatcataccc

SEQ ID NO: 6372 - DNA, 50 bp, Artificial Sequence
  Description of Artificial Sequence: Synthetic probe
tagttgtttattygatattaagtagttttttaataggttaggtgttgttg

SEQ ID NO: 6373 - DNA, 50 bp, Artificial Sequence
  Description of Artificial Sequence: Synthetic probe
ataaaaataacataataaatatcactaataccaacttcaactatttactc

SEQ ID NO: 6374 - DNA, 50 bp, Artificial Sequence
  Description of Artificial Sequence: Synthetic probe
tgaaattatattygtagtagtatttgatttgttaaaaggttgtttggtgt

SEQ ID NO: 6375 - DNA, 50 bp, Artificial Sequence
  Description of Artificial Sequence: Synthetic probe
taaatattaactataattctaactacatcacaaaaacattaataaaaatc

SEQ ID NO: 6376 - DNA, 50 bp, Artificial Sequence
  Description of Artificial Sequence: Synthetic probe
ttaaatgttagttatggttttgattatattataggaatattggtgagggt

SEQ ID NO: 6377 - DNA, 50 bp, Artificial Sequence
  Description of Artificial Sequence: Synthetic probe
ttacctatctttaaaataaaacaataatcccaataaataataactcccac

SEQ ID NO: 6378 - DNA, 50 bp, Artificial Sequence
  Description of Artificial Sequence: Synthetic probe
ataattacttctaaaatctcaatatcccctacaacctaaaaatcaacccc

SEQ ID NO: 6379 - DNA, 50 bp, Artificial Sequence
  Description of Artificial Sequence: Synthetic probe
tttgtttgtttttaaaatggggtagtaattttagtaggtggtgattttta

SEQ ID NO: 6380 - DNA, 50 bp, Artificial Sequence
  Description of Artificial Sequence: Synthetic probe
accaaactctcractcccacrtcrcaaatacaattattatacaaactatc

SEQ ID NO: 6381 - DNA, 50 bp, Artificial Sequence
  Description of Artificial Sequence: Synthetic probe
agttaagttttyggtttttaygtygtagatgtagttattgtataagttgt

SEQ ID NO: 6382 - DNA, 50 bp, Artificial Sequence
  Description of Artificial Sequence: Synthetic probe
tccccctaacctctatttccracaacttatacaataactacatctacrac

SEQ ID NO: 6383 - DNA, 50 bp, Artificial Sequence
  Description of Artificial Sequence: Synthetic probe
gtttttgttttygatagtttgtataataattgtatttgygaygtgggagt

SEQ ID NO: 6384 - DNA, 50 bp, Artificial Sequence
  Description of Artificial Sequence: Synthetic probe
ttttattattyggagggatattatgttyggaagtataygagttaagtttt

SEQ ID NO: 6385 - DNA, 50 bp, Artificial Sequence
  Description of Artificial Sequence: Synthetic probe
caacttatacaataactacatctacracrtaaaaaccraaaacttaactc

SEQ ID NO: 6386 - DNA, 50 bp, Artificial Sequence
  Description of Artificial Sequence: Synthetic probe
ctaacaacraactactaaaccccracaaccrtaaacttattatactaaac

SEQ ID NO: 6387 - DNA, 50 bp, Artificial Sequence
  Description of Artificial Sequence: Synthetic probe
aactaaaaaatcccaaaaaccaaaccccaaaataaatttctcttaccaac

SEQ ID NO: 6388 - DNA, 50 bp, Artificial Sequence
  Description of Artificial Sequence: Synthetic probe
caaaccccaaaataaatttctcttaccaacrtccaatacaacaaattcac

SEQ ID NO: 6389 - DNA, 50 bp, Artificial Sequence
  Description of Artificial Sequence: Synthetic probe
cataaaaacacctccraaaactaacaacraactactaaaccccracaacc

SEQ ID NO: 6390 - DNA, 50 bp, Artificial Sequence
  Description of Artificial Sequence: Synthetic probe
caaaataaatttctcttaccaacrtccaatacaacaaattcacractacc

SEQ ID NO: 6391 - DNA, 50 bp, Artificial Sequence
  Description of Artificial Sequence: Synthetic probe
raaacccaacaactcrctaccaaccttcraaaatatcctcatataaaaac

SEQ ID NO: 6392 - DNA, 50 bp, Artificial Sequence
  Description of Artificial Sequence: Synthetic probe
aaaaaataaattattctccacccaccaaaattacctaaacttacrccaac

SEQ ID NO: 6393 - DNA, 50 bp, Artificial Sequence
  Description of Artificial Sequence: Synthetic probe
caacaactcrctaccaaccttcraaaatatcctcatataaaaacrctaac

SEQ ID NO: 6394 - DNA, 50 bp, Artificial Sequence
  Description of Artificial Sequence: Synthetic probe
acrtaaatccaaacaaccctaataaataaaaaacaactcactccccaaac

SEQ ID NO: 6395 - DNA, 50 bp, Artificial Sequence
  Description of Artificial Sequence: Synthetic probe
aataaataaaaaacaactcactccccaaacrtataacccaatataacccc

SEQ ID NO: 6396 - DNA, 50 bp, Artificial Sequence
  Description of Artificial Sequence: Synthetic probe
ttgtgataagggttttgtatgtatttgtttattaaataaatagtagtggt

SEQ ID NO: 6397 - DNA, 50 bp, Artificial Sequence
  Description of Artificial Sequence: Synthetic probe
tataataaaaactttacatatatctactcattaaataaacaataataacc

SEQ ID NO: 6398 - DNA, 50 bp, Artificial Sequence
  Description of Artificial Sequence: Synthetic probe
taaacaaatacatacaaaacccttatcacaatacaaaaaaaattcaaaac

SEQ ID NO: 6399 - DNA, 50 bp, Artificial Sequence
  Description of Artificial Sequence: Synthetic probe
cacaatatctaacacacaatcatcacttattaaactaatactttctaaac

SEQ ID NO: 6400 - DNA, 50 bp, Artificial Sequence
  Description of Artificial Sequence: Synthetic probe
atgagtagatatatgtaaagtttttattatagtgtaagggaaatttaaag

SEQ ID NO: 6401 - DNA, 50 bp, Artificial Sequence
  Description of Artificial Sequence: Synthetic probe
aatatatataataataacaaccaacatattattaaactccaattcttaac

SEQ ID NO: 6402 - DNA, 50 bp, Artificial Sequence
  Description of Artificial Sequence: Synthetic probe
taactaaaatattcttcccaactctccatataactaatttctcatccttc

SEQ ID NO: 6403 - DNA, 50 bp, Artificial Sequence
  Description of Artificial Sequence: Synthetic probe
rccttactaaatacaaaaaacacaacaatatacaaaacraaatatttccc

SEQ ID NO: 6404 - DNA, 50 bp, Artificial Sequence
  Description of Artificial Sequence: Synthetic probe
acttatttatacaatctactcttatcctaaaacataaactccaaaaaaac

SEQ ID NO: 6405 - DNA, 50 bp, Artificial Sequence
  Description of Artificial Sequence: Synthetic probe
raaaaacatctcrctttatacactactataccctctatacccaacaaaac

SEQ ID NO: 6406 - DNA, 50 bp, Artificial Sequence
  Description of Artificial Sequence: Synthetic probe
taaaaattatttattcattttatattattaaacacctattatacacaaac

SEQ ID NO: 6407 - DNA, 50 bp, Artificial Sequence
  Description of Artificial Sequence: Synthetic probe
aaactaaaaatcctaatataaaaccttttaacccaaaaaaacatcttttc

SEQ ID NO: 6408 - DNA, 50 bp, Artificial Sequence
  Description of Artificial Sequence: Synthetic probe
cacraaaacaataatttatccacatcttacrataactatacrttaactac

SEQ ID NO: 6409 - DNA, 50 bp, Artificial Sequence
  Description of Artificial Sequence: Synthetic probe
atcctaatataaaaccttttaacccaaaaaaacatcttttcrtaattaac

SEQ ID NO: 6410 - DNA, 50 bp, Artificial Sequence
  Description of Artificial Sequence: Synthetic probe
agatttgtgatayggagatagtaatttatttatattttaygatgattgtg

SEQ ID NO: 6411 - DNA, 50 bp, Artificial Sequence
  Description of Artificial Sequence: Synthetic probe
aatctataacacraaaacaataatttatccacatcttacrataactatac

SEQ ID NO: 6412 - DNA, 50 bp, Artificial Sequence
  Description of Artificial Sequence: Synthetic probe
aatatcacttaaatctataacacraaaacaataatttatccacatcttac

SEQ ID NO: 6413 - DNA, 50 bp, Artificial Sequence
  Description of Artificial Sequence: Synthetic probe
aaaccttttaacccaaaaaaacatcttttcrtaattaacrcacaatcatc

SEQ ID NO: 6414 - DNA, 50 bp, Artificial Sequence
  Description of Artificial Sequence: Synthetic probe
ccattcctttataaaaatataactataaatatcacttaaatctataacac

SEQ ID NO: 6415 - DNA, 50 bp, Artificial Sequence
  Description of Artificial Sequence: Synthetic probe
ttcrtaattaacrcacaatcatcrtaaaatataaataaattactatctcc

SEQ ID NO: 6416 - DNA, 50 bp, Artificial Sequence
  Description of Artificial Sequence: Synthetic probe
cctccraacaacrctttaccacctaacaaataaaattcaaaaacacttcc

SEQ ID NO: 6417 - DNA, 50 bp, Artificial Sequence
  Description of Artificial Sequence: Synthetic probe
acttctaacttctttaaaaaacctctctacaaaaacaaacacaatatacc

SEQ ID NO: 6418 - DNA, 50 bp, Artificial Sequence
  Description of Artificial Sequence: Synthetic probe
tttttygagtagygttttattatttgataaatggggtttaggggtatttt

SEQ ID NO: 6419 - DNA, 50 bp, Artificial Sequence
  Description of Artificial Sequence: Synthetic probe
atccactaaacataaaattacactatcataccctaattcctccraacaac

SEQ ID NO: 6420 - DNA, 50 bp, Artificial Sequence
  Description of Artificial Sequence: Synthetic probe
ataccraaaatacccctaaaccccatttatcaaataataaaacrctactc

SEQ ID NO: 6421 - DNA, 50 bp, Artificial Sequence
  Description of Artificial Sequence: Synthetic probe
acttacaatccactaaacataaaattacactatcataccctaattcctcc

SEQ ID NO: 6422 - DNA, 50 bp, Artificial Sequence
  Description of Artificial Sequence: Synthetic probe
aaatcaaaacataataatacaattccatatccaataaattataaatccac

SEQ ID NO: 6423 - DNA, 50 bp, Artificial Sequence
  Description of Artificial Sequence: Synthetic probe
ggaattagggtatgatagtgtaattttatgtttagtggattgtaagttta

SEQ ID NO: 6424 - DNA, 50 bp, Artificial Sequence
  Description of Artificial Sequence: Synthetic probe
tatccaataaattataaatccacrcaccttccaaataatcactcttcctc

SEQ ID NO: 6425 - DNA, 50 bp, Artificial Sequence
  Description of Artificial Sequence: Synthetic probe
atcacttaaaaacaaataatactccaactatctccccccaaaattctacc

SEQ ID NO: 6426 - DNA, 50 bp, Artificial Sequence
  Description of Artificial Sequence: Synthetic probe
attygttttttagtaagttggtaaaatagatattatgttggtgagtgtta

SEQ ID NO: 6427 - DNA, 50 bp, Artificial Sequence
  Description of Artificial Sequence: Synthetic probe
tttgttttttagtaagttggtaaaatagatattatgttggtgagtgttat

SEQ ID NO: 6428 - DNA, 50 bp, Artificial Sequence
  Description of Artificial Sequence: Synthetic probe
ctcrttcttcaacaaattaacaaaacaaacatcatactaataaataccac

SEQ ID NO: 6429 - DNA, 50 bp, Artificial Sequence
  Description of Artificial Sequence: Synthetic probe
tcattcttcaacaaattaacaaaacaaacatcatactaataaataccaca

SEQ ID NO: 6430 - DNA, 50 bp, Artificial Sequence
  Description of Artificial Sequence: Synthetic probe
aacrtaacactcaccaacataatatctattttaccaacttactaaaaaac

SEQ ID NO: 6431 - DNA, 50 bp, Artificial Sequence
  Description of Artificial Sequence: Synthetic probe
acataacactcaccaacataatatctattttaccaacttactaaaaaaca

SEQ ID NO: 6432 - DNA, 50 bp, Artificial Sequence
  Description of Artificial Sequence: Synthetic probe
ctattaaaaaactaaaaataaaattctcrctccttcatttcaaattactc

SEQ ID NO: 6433 - DNA, 50 bp, Artificial Sequence
  Description of Artificial Sequence: Synthetic probe
tattaaaaaactaaaaataaaattctcactccttcatttcaaattactca

SEQ ID NO: 6434 - DNA, 50 bp, Artificial Sequence
  Description of Artificial Sequence: Synthetic probe
taaygtggtatttattagtatgatgtttgttttgttaatttgttgaagaa

SEQ ID NO: 6435 - DNA, 50 bp, Artificial Sequence
  Description of Artificial Sequence: Synthetic probe
aatgtggtatttattagtatgatgtttgttttgttaatttgttgaagaat

SEQ ID NO: 6436 - DNA, 50 bp, Artificial Sequence
  Description of Artificial Sequence: Synthetic probe
ccaacaacttcctcaacttctttttcttctaaatcacccctaaaacaatc

SEQ ID NO: 6437 - DNA, 50 bp, Artificial Sequence
  Description of Artificial Sequence: Synthetic probe
ttgagtttttaggttagttgggtttagttygaggttggttttagatgtag

SEQ ID NO: 6438 - DNA, 50 bp, Artificial Sequence
  Description of Artificial Sequence: Synthetic probe
tttattttattttyggagaggatattttaaattgyggatataygtaaaag

SEQ ID NO: 6439 - DNA, 50 bp, Artificial Sequence
  Description of Artificial Sequence: Synthetic probe
ttattttatttttggagaggatattttaaattgtggatatatgtaaaagt

SEQ ID NO: 6440 - DNA, 50 bp, Artificial Sequence
  Description of Artificial Sequence: Synthetic probe
taaatttagttggtttgaaggtttaatttatattaaayggagttgggagt

SEQ ID NO: 6441 - DNA, 50 bp, Artificial Sequence
  Description of Artificial Sequence: Synthetic probe
aaatttagttggtttgaaggtttaatttatattaaatggagttgggagtt

SEQ ID NO: 6442 - DNA, 50 bp, Artificial Sequence
  Description of Artificial Sequence: Synthetic probe
acaatatcaaatcrataacctaaccttaacttctaattatttacaactac

SEQ ID NO: 6443 - DNA, 50 bp, Artificial Sequence
  Description of Artificial Sequence: Synthetic probe
caatatcaaatcaataacctaaccttaacttctaattatttacaactaca

SEQ ID NO: 6444 - DNA, 50 bp, Artificial Sequence
  Description of Artificial Sequence: Synthetic probe
ggatgaagtgtagggaggtaaattttggttgggtttttgtaaatatttat

SEQ ID NO: 6445 - DNA, 50 bp, Artificial Sequence
  Description of Artificial Sequence: Synthetic probe
taacctttcctaaaactattctccaaccacataaacctccttttaattac

SEQ ID NO: 6446 - DNA, 50 bp, Artificial Sequence
  Description of Artificial Sequence: Synthetic probe
atcctaccrtttcacttctatttcactccatatctacacctacaaaaacc

SEQ ID NO: 6447 - DNA, 50 bp, Artificial Sequence
  Description of Artificial Sequence: Synthetic probe
accaaacactatactaaaccaacaaacattcattctataaaaaaacraac

SEQ ID NO: 6448 - DNA, 50 bp, Artificial Sequence
  Description of Artificial Sequence: Synthetic probe
tataataaacaaaaactcctttaaaaaaataaacactaataccattcacc

SEQ ID NO: 6449 - DNA, 50 bp, Artificial Sequence
  Description of Artificial Sequence: Synthetic probe
aattctctccttaaatctttattctacaaattctctccctcraatcatac

SEQ ID NO: 6450 - DNA, 50 bp, Artificial Sequence
  Description of Artificial Sequence: Synthetic probe
gaaagtaggtaaatgagagggaatagatgtagattaaggattattaggaa

SEQ ID NO: 6451 - DNA, 50 bp, Artificial Sequence
  Description of Artificial Sequence: Synthetic probe
cctaaccctaataacaatcctataaaaaaacctaataactcctacacatc

SEQ ID NO: 6452 - DNA, 50 bp, Artificial Sequence
  Description of Artificial Sequence: Synthetic probe
aattaacacccattcatatttactttctcccaaaaatctataaatcctac

SEQ ID NO: 6453 - DNA, 50 bp, Artificial Sequence
  Description of Artificial Sequence: Synthetic probe
ttttgattttgatgatagttttgtggaagaatttggtaatttttgtatat

SEQ ID NO: 6454 - DNA, 50 bp, Artificial Sequence
  Description of Artificial Sequence: Synthetic probe
aattagaagagttgatataattaaatagttatayggtaygaagaygtatg

SEQ ID NO: 6455 - DNA, 50 bp, Artificial Sequence
  Description of Artificial Sequence: Synthetic probe
atcaaaaaaattaacacaatcaaataaccacacracacraaaacrcatac

SEQ ID NO: 6456 - DNA, 50 bp, Artificial Sequence
  Description of Artificial Sequence: Synthetic probe
taacaaaaactacatttataatcaaaatccacaacttatctccctcccac

SEQ ID NO: 6457 - DNA, 50 bp, Artificial Sequence
  Description of Artificial Sequence: Synthetic probe
catacacaacccaactaaaaactaccaaactcraacaaatcrtaccattc

SEQ ID NO: 6458 - DNA, 50 bp, Artificial Sequence
  Description of Artificial Sequence: Synthetic probe
ttatgtatagtttaattggagattgttaagttygagtaggtygtgttatt

SEQ ID NO: 6459 - DNA, 50 bp, Artificial Sequence
  Description of Artificial Sequence: Synthetic probe
catcccactcacctatccatttcctaatttaaacataattttacraactc

SEQ ID NO: 6460 - DNA, 50 bp, Artificial Sequence
  Description of Artificial Sequence: Synthetic probe
attacctattaaacccctaatacraatcaatcccrccaaaaacccttaac

SEQ ID NO: 6461 - DNA, 50 bp, Artificial Sequence
  Description of Artificial Sequence: Synthetic probe
aactatcatcactaattattctaaaactactttcctccacaacatcttac

SEQ ID NO: 6462 - DNA, 50 bp, Artificial Sequence
  Description of Artificial Sequence: Synthetic probe
accctttaatactatacacctcataaaattattacccacatcaacrtcac

SEQ ID NO: 6463 - DNA, 50 bp, Artificial Sequence
  Description of Artificial Sequence: Synthetic probe
raccaaaacaaaaactaccctaaaaatcctataaactacataaaaaaaac

SEQ ID NO: 6464 - DNA, 50 bp, Artificial Sequence
  Description of Artificial Sequence: Synthetic probe
attaaaaaacraaatccctaattctaacaaaatacaataaacctataaac

SEQ ID NO: 6465 - DNA, 50 bp, Artificial Sequence
  Description of Artificial Sequence: Synthetic probe
aaataaaaacatactcaacrccaaattcattcraaacctacaaaaacrtc

SEQ ID NO: 6466 - DNA, 50 bp, Artificial Sequence
  Description of Artificial Sequence: Synthetic probe
ctttccttttaatccttttaaaacttcttctactcatcrtcataaaaatc

SEQ ID NO: 6467 - DNA, 50 bp, Artificial Sequence
  Description of Artificial Sequence: Synthetic probe
rctaaaaaaaaccctttaaaacttataactccactccraaaaacraactc

SEQ ID NO: 6468 - DNA, 50 bp, Artificial Sequence
  Description of Artificial Sequence: Synthetic probe
aacactactcccaactcctaactaacttctaatcttctaattaaaactac

SEQ ID NO: 6469 - DNA, 50 bp, Artificial Sequence
  Description of Artificial Sequence: Synthetic probe
cacccttaatccaacatctaacccctaatctacaaccaataacaaaaatc

SEQ ID NO: 6470 - DNA, 50 bp, Artificial Sequence
  Description of Artificial Sequence: Synthetic probe
aaaaaccttctctccctacaattcccattcataaaacatctaaaaacctc

SEQ ID NO: 6471 - DNA, 50 bp, Artificial Sequence
  Description of Artificial Sequence: Synthetic probe
ttatttttggtttagtatttggtttttgatttgtagttaatggtaggaat

SEQ ID NO: 6472 - DNA, 50 bp, Artificial Sequence
  Description of Artificial Sequence: Synthetic probe
aaacccatcaatccatctctcacatataccttaataatattcacctcaac

SEQ ID NO: 6473 - DNA, 50 bp, Artificial Sequence
  Description of Artificial Sequence: Synthetic probe
aactctaaccaaaaacctacaattatctttatacttaaatactatccttc

SEQ ID NO: 6474 - DNA, 50 bp, Artificial Sequence
  Description of Artificial Sequence: Synthetic probe
ccaaaattttcaaatcttcratactatcatattaaaaatccactatccac

SEQ ID NO: 6475 - DNA, 50 bp, Artificial Sequence
  Description of Artificial Sequence: Synthetic probe
ataaaataactaaacaaaccaatccaaaaaccccraaaaacrtttcrtcc

SEQ ID NO: 6476 - DNA, 50 bp, Artificial Sequence
  Description of Artificial Sequence: Synthetic probe
attatacaaataaataaaactacccraaaaatacctacrctacrtaatac

SEQ ID NO: 6477 - DNA, 50 bp, Artificial Sequence
  Description of Artificial Sequence: Synthetic probe
aaatcatccaacactcaccccaaccaaaaccataaaaattactaaaaccc

SEQ ID NO: 6478 - DNA, 50 bp, Artificial Sequence
  Description of Artificial Sequence: Synthetic probe
tcccaacaatccaaaacraaattctaaaaataatttcccrtaaaaacacc

SEQ ID NO: 6479 - DNA, 50 bp, Artificial Sequence
  Description of Artificial Sequence: Synthetic probe
gaatttttgggagtaataatagtgggatagaataagattgtagtgtagaa

SEQ ID NO: 6480 - DNA, 50 bp, Artificial Sequence
  Description of Artificial Sequence: Synthetic probe
ataccccaaccaattaactactcraacctacatttttcattcraaaaaac

SEQ ID NO: 6481 - DNA, 50 bp, Artificial Sequence
  Description of Artificial Sequence: Synthetic probe
attctccttctactaaataacattcaaaaatcttaatcttctaaatttcc

SEQ ID NO: 6482 - DNA, 50 bp, Artificial Sequence
  Description of Artificial Sequence: Synthetic probe
atccaaatattacrataatttaatacccaaacctttaatttaaaaaacac

SEQ ID NO: 6483 - DNA, 50 bp, Artificial Sequence
  Description of Artificial Sequence: Synthetic probe
aaactaaatccraacctctccaatcaacaacrattaaaaaaacraaacrc

SEQ ID NO: 6484 - DNA, 50 bp, Artificial Sequence
  Description of Artificial Sequence: Synthetic probe
taaaatccaaaactaccracatttctacaacaaaatctaaaatactcttc

SEQ ID NO: 6485 - DNA, 50 bp, Artificial Sequence
  Description of Artificial Sequence: Synthetic probe
raaattacctaataaatatctcccattcaaaaaaacccaaatcrtataac

SEQ ID NO: 6486 - DNA, 50 bp, Artificial Sequence
  Description of Artificial Sequence: Synthetic probe
crcctcttcttacaacctatattaacctcatctacccaacaactatcrac

SEQ ID NO: 6487 - DNA, 50 bp, Artificial Sequence
  Description of Artificial Sequence: Synthetic probe
caacaccccrcaaatccrcaaaaaccttaatcaatatcaaaacataaacc

SEQ ID NO: 6488 - DNA, 50 bp, Artificial Sequence
  Description of Artificial Sequence: Synthetic probe
taagtttattgttagggtggattgaaagatatgttatatagagtttggta

SEQ ID NO: 6489 - DNA, 50 bp, Artificial Sequence
  Description of Artificial Sequence: Synthetic probe
aaattcactattaaaataaactaaaaaacatatcacacaaaacctaacac

SEQ ID NO: 6490 - DNA, 50 bp, Artificial Sequence
  Description of Artificial Sequence: Synthetic probe
aactataattatttattcaaatatctatctaccctacctacacaaaaaac

SEQ ID NO: 6491 - DNA, 50 bp, Artificial Sequence
  Description of Artificial Sequence: Synthetic probe
tgaagttttaggaaagatttgtgtatgaagttttagggaagattttgatt

SEQ ID NO: 6492 - DNA, 50 bp, Artificial Sequence
  Description of Artificial Sequence: Synthetic probe
aaaatcccaaaaaaaacctatacataaaatcccaaaaaaaaccctaaccc

SEQ ID NO: 6493 - DNA, 50 bp, Artificial Sequence
  Description of Artificial Sequence: Synthetic probe
aacttcatacacaaatctttcctaaaacttcatataaaaccaaccatccc

SEQ ID NO: 6494 - DNA, 50 bp, Artificial Sequence
  Description of Artificial Sequence: Synthetic probe
accaaaaatatccratactaatacttatatcctaaccactaccttacaac

SEQ ID NO: 6495 - DNA, 50 bp, Artificial Sequence
  Description of Artificial Sequence: Synthetic probe
ataaaataaattaataaactatttttcccraatcaaccaaccaaaaattc

SEQ ID NO: 6496 - DNA, 50 bp, Artificial Sequence
  Description of Artificial Sequence: Synthetic probe
aaaaaaataaacrcccccacrtctcctaaaactatccttaaatccratac

SEQ ID NO: 6497 - DNA, 50 bp, Artificial Sequence
  Description of Artificial Sequence: Synthetic probe
aaatataaacrcaacaaaaaacraatatattaaacccccrcccatcccrc

SEQ ID NO: 6498 - DNA, 50 bp, Artificial Sequence
  Description of Artificial Sequence: Synthetic probe
aaaactaacractactaccraaaaatcacrtaaattcraaataccaaccc

SEQ ID NO: 6499 - DNA, 50 bp, Artificial Sequence
  Description of Artificial Sequence: Synthetic probe
tccrccaatacataaaactaacractactaccraaaaatcacrtaaattc

SEQ ID NO: 6500 - DNA, 50 bp, Artificial Sequence
  Description of Artificial Sequence: Synthetic probe
aaaaataaaaaccrccrcctaaaactactccrccaatacataaaactaac

SEQ ID NO: 6501 - DNA, 50 bp, Artificial Sequence
  Description of Artificial Sequence: Synthetic probe
tccatacactaacraaacaactctaaacracracttctactttcaatttc

SEQ ID NO: 6502 - DNA, 50 bp, Artificial Sequence
  Description of Artificial Sequence: Synthetic probe
ctaaacracracttctactttcaatttcrtacaaaacrcraaaaaaccrc

SEQ ID NO: 6503 - DNA, 50 bp, Artificial Sequence
  Description of Artificial Sequence: Synthetic probe
craatacccccactcactataaataacacctacatccttcttccraaatc

SEQ ID NO: 6504 - DNA, 50 bp, Artificial Sequence
  Description of Artificial Sequence: Synthetic probe
gtatgattgtttaggtatttttgagtaaggtaatgtttattaggtaaagg

SEQ ID NO: 6505 - DNA, 50 bp, Artificial Sequence
  Description of Artificial Sequence: Synthetic probe
aaaaatctaaataatcratcacacttcacrtcactacacccccaataaac

SEQ ID NO: 6506 - DNA, 50 bp, Artificial Sequence
  Description of Artificial Sequence: Synthetic probe
taaacattaccttactcaaaaatacctaaacaatcatacctccctccccc

SEQ ID NO: 6507 - DNA, 50 bp, Artificial Sequence
  Description of Artificial Sequence: Synthetic probe
aatccatcctacrcatatacaaaaaatctaaataatcratcacacttcac

SEQ ID NO: 6508 - DNA, 50 bp, Artificial Sequence
  Description of Artificial Sequence: Synthetic probe
atataatttcaaaaacctcrcttcaacctaccacataaaaaaactaaaac

SEQ ID NO: 6509 - DNA, 50 bp, Artificial Sequence
  Description of Artificial Sequence: Synthetic probe
aaaataaaataacaaaaacaactaaacaaaaatataatttcaaaaacctc

SEQ ID NO: 6510 - DNA, 50 bp, Artificial Sequence
  Description of Artificial Sequence: Synthetic probe
aaacctcttctatcatcacrctccaattctcccatataacaaactaaaac

SEQ ID NO: 6511 - DNA, 50 bp, Artificial Sequence
  Description of Artificial Sequence: Synthetic probe
aaagatagggtagtagaggtagttgagtaaagatatggttttaaaagttt

SEQ ID NO: 6512 - DNA, 50 bp, Artificial Sequence
  Description of Artificial Sequence: Synthetic probe
cctactccacaccaaaactatataaccctaataaattacrcaacctcttc

SEQ ID NO: 6513 - DNA, 50 bp, Artificial Sequence
  Description of Artificial Sequence: Synthetic probe
acccrtcaacttctctcaatacctaaatcttaataaaaacaaatacctcc

SEQ ID NO: 6514 - DNA, 50 bp, Artificial Sequence
  Description of Artificial Sequence: Synthetic probe
atacraaaacatttaccctcaccaaaattcaaacactaaaaaaaactaac

SEQ ID NO: 6515 - DNA, 50 bp, Artificial Sequence
  Description of Artificial Sequence: Synthetic probe
gtgattattataaagtagttatatattaggtgtttagggaaggtttagga

SEQ ID NO: 6516 - DNA, 50 bp, Artificial Sequence
  Description of Artificial Sequence: Synthetic probe
taaccaccacaaaacaactacatatcaaatatccaaaaaaaactcaaaac

SEQ ID NO: 6517 - DNA, 50 bp, Artificial Sequence
  Description of Artificial Sequence: Synthetic probe
aaaatatcraataaaataacttatactaaaaatactactaattcaattac

SEQ ID NO: 6518 - DNA, 50 bp, Artificial Sequence
  Description of Artificial Sequence: Synthetic probe
aaatatcaaataaaataacttatactaaaaatactactaattcaattaca

SEQ ID NO: 6519 - DNA, 50 bp, Artificial Sequence
  Description of Artificial Sequence: Synthetic probe
tttttatcctcaattcaaaacttaatattttcattaaatcacccaaaaac

SEQ ID NO: 6520 - DNA, 50 bp, Artificial Sequence
  Description of Artificial Sequence: Synthetic probe
gaaagtatyggatgaaataatttatgttggagatattgttagtttagttg

SEQ ID NO: 6521 - DNA, 50 bp, Artificial Sequence
  Description of Artificial Sequence: Synthetic probe
aaagtattggatgaaataatttatgttggagatattgttagtttagttgt

SEQ ID NO: 6522 - DNA, 50 bp, Artificial Sequence
  Description of Artificial Sequence: Synthetic probe
aaaaataaactaacacaaactcccacaccacrcaacaaaaatcttcctac

SEQ ID NO: 6523 - DNA, 50 bp, Artificial Sequence
  Description of Artificial Sequence: Synthetic probe
aaaaacatcaaaactccataaaaaaaccacttccctacctattttatatc

SEQ ID NO: 6524 - DNA, 50 bp, Artificial Sequence
  Description of Artificial Sequence: Synthetic probe
aaaatttctaaaaaaatcaaacaatcaaaaaccaatccctacatttaaac

SEQ ID NO: 6525 - DNA, 50 bp, Artificial Sequence
  Description of Artificial Sequence: Synthetic probe
aaaacttctctcattcttaaccaattctcaaaataatcctcrttctccac

SEQ ID NO: 6526 - DNA, 50 bp, Artificial Sequence
  Description of Artificial Sequence: Synthetic probe
ctctacccccactactaccaaccataactataaccaaaaaattcacatcc

SEQ ID NO: 6527 - DNA, 50 bp, Artificial Sequence
  Description of Artificial Sequence: Synthetic probe
aatacccaaaaataaacactaacaacctataaacctaaacattaccratc

SEQ ID NO: 6528 - DNA, 50 bp, Artificial Sequence
  Description of Artificial Sequence: Synthetic probe
aattaaaaaattaacatctaacactataaaaacccaactcccacaattcc

SEQ ID NO: 6529 - DNA, 50 bp, Artificial Sequence
  Description of Artificial Sequence: Synthetic probe
taatgtttaggggtgagtattaataatttgtaggtttaggtattatygat

SEQ ID NO: 6530 - DNA, 50 bp, Artificial Sequence
  Description of Artificial Sequence: Synthetic probe
aaaaaattaacatctaacactataaaaacccaactcccacaattccratc

SEQ ID NO: 6531 - DNA, 50 bp, Artificial Sequence
  Description of Artificial Sequence: Synthetic probe
ctacaatacccaaaaataaacactaacaacctataaacctaaacattacc

SEQ ID NO: 6532 - DNA, 50 bp, Artificial Sequence
  Description of Artificial Sequence: Synthetic probe
taaaaggttaatatttggtattgtaggggtttagtttttatagtttygat

SEQ ID NO: 6533 - DNA, 50 bp, Artificial Sequence
  Description of Artificial Sequence: Synthetic probe
aaaaataaaaaaatataaatcacrattctatccattctacaataatacac

SEQ ID NO: 6534 - DNA, 50 bp, Artificial Sequence
  Description of Artificial Sequence: Synthetic probe
accaccccaacttccaaaaaaaatcaattctaaaaaaacataaactctcc

SEQ ID NO: 6535 - DNA, 50 bp, Artificial Sequence
  Description of Artificial Sequence: Synthetic probe
catatccctaccccttacaaaattaaccaaaaaatacctacaactcctac

SEQ ID NO: 6536 - DNA, 50 bp, Artificial Sequence
  Description of Artificial Sequence: Synthetic probe
ctaataaaaaacrtaaaactaccctaacccaaaaatttaactcctataac

SEQ ID NO: 6537 - DNA, 50 bp, Artificial Sequence
  Description of Artificial Sequence: Synthetic probe
tagagttggttaagaagtatttgtagtttttgyggatttttgtttagtag

SEQ ID NO: 6538 - DNA, 50 bp, Artificial Sequence
  Description of Artificial Sequence: Synthetic probe
aaaattaaccaaaaaatacctacaactcctacraacctctacccaacaac

SEQ ID NO: 6539 - DNA, 50 bp, Artificial Sequence
  Description of Artificial Sequence: Synthetic probe
ctacccaacaacrctacaaaaaccaaatccctaaatcaaaacaaccccac

SEQ ID NO: 6540 - DNA, 50 bp, Artificial Sequence
  Description of Artificial Sequence: Synthetic probe
tttgtttagtagygttataggagttaaatttttgggttagggtagtttta

SEQ ID NO: 6541 - DNA, 50 bp, Artificial Sequence
  Description of Artificial Sequence: Synthetic probe
rtcccccataataaccccctccraaatatctaaaaatactataacccrac

SEQ ID NO: 6542 - DNA, 50 bp, Artificial Sequence
  Description of Artificial Sequence: Synthetic probe
atattaaaaaaatccraaatactcacrtcaacaccatcttccaccttaac

SEQ ID NO: 6543 - DNA, 50 bp, Artificial Sequence
  Description of Artificial Sequence: Synthetic probe
accctcraacccttattaaccctaatattaaaaaaatccraaatactcac

SEQ ID NO: 6544 - DNA, 50 bp, Artificial Sequence
  Description of Artificial Sequence: Synthetic probe
aaaacacratcaccctcraacccttattaaccctaatattaaaaaaatcc

SEQ ID NO: 6545 - DNA, 50 bp, Artificial Sequence
  Description of Artificial Sequence: Synthetic probe
actaacrtaaacatctcraacctcttcaacaccaaaattaacaaaaaccc

SEQ ID NO: 6546 - DNA, 50 bp, Artificial Sequence
  Description of Artificial Sequence: Synthetic probe
aaccrtacttttaaaaaaaactaacataaacaaaaccacrctaacccacc

SEQ ID NO: 6547 - DNA, 50 bp, Artificial Sequence
  Description of Artificial Sequence: Synthetic probe
caaaacctaaaaacaattcaaataaccctctacccacttctaacaaaacc

SEQ ID NO: 6548 - DNA, 50 bp, Artificial Sequence
  Description of Artificial Sequence: Synthetic probe
tatttccaaaccctattcctttttaaattccrccaactcaacttaatcac

SEQ ID NO: 6549 - DNA, 50 bp, Artificial Sequence
  Description of Artificial Sequence: Synthetic probe
aaacttaatcaacrttcttctccaaatactaaaaaacaatatcrtaatcc

SEQ ID NO: 6550 - DNA, 50 bp, Artificial Sequence
  Description of Artificial Sequence: Synthetic probe
atcaacaaaacttaatcaacrttcttctccaaatactaaaaaacaatatc

SEQ ID NO: 6551 - DNA, 50 bp, Artificial Sequence
  Description of Artificial Sequence: Synthetic probe
tacaaacaaacaaacaaacaacttccctaaacraaaaataaccatcaccc

SEQ ID NO: 6552 - DNA, 50 bp, Artificial Sequence
  Description of Artificial Sequence: Synthetic probe
tctctacaataaaaccctcctacctaactaccraataataactacctccc

SEQ ID NO: 6553 - DNA, 50 bp, Artificial Sequence
  Description of Artificial Sequence: Synthetic probe
cctacctacaaaaacaaccataatccacatattaaactttaataaaccac

SEQ ID NO: 6554 - DNA, 50 bp, Artificial Sequence
  Description of Artificial Sequence: Synthetic probe
ctcccrcrataactaaacrctaaaaaaataattcacatattcttccaccc

SEQ ID NO: 6555 - DNA, 50 bp, Artificial Sequence
  Description of Artificial Sequence: Synthetic probe
taaactttaataaaccacraataaaaaaatatataaatcacttcttcaac

SEQ ID NO: 6556 - DNA, 50 bp, Artificial Sequence
  Description of Artificial Sequence: Synthetic probe
aaaccacraataaaaaaatatataaatcacttcttcaacrcccaaccatc

SEQ ID NO: 6557 - DNA, 50 bp, Artificial Sequence
  Description of Artificial Sequence: Synthetic probe
accacraataaaaaaatatataaatcacttcttcaacrcccaaccatcrc

SEQ ID NO: 6558 - DNA, 50 bp, Artificial Sequence
  Description of Artificial Sequence: Synthetic probe
aaaacaaacracttaacacaatacraacaccrcacacaaacttcraaaac

SEQ ID NO: 6559 - DNA, 50 bp, Artificial Sequence
  Description of Artificial Sequence: Synthetic probe
aaaacaaaaacaaacracttaacacaatacraacaccrcacacaaacttc

SEQ ID NO: 6560 - DNA, 50 bp, Artificial Sequence
  Description of Artificial Sequence: Synthetic probe
accatcrcraaaaaaaaccctaataaaattacaaacaaataaacrtctcc

SEQ ID NO: 6561 - DNA, 50 bp, Artificial Sequence
  Description of Artificial Sequence: Synthetic probe
aaaaccctaataaaattacaaacaaataaacrtctccraaacctatatac

SEQ ID NO: 6562 - DNA, 50 bp, Artificial Sequence
  Description of Artificial Sequence: Synthetic probe
taataaaattacaaacaaataaacrtctccraaacctatatacrataccc

SEQ ID NO: 6563 - DNA, 50 bp, Artificial Sequence
  Description of Artificial Sequence: Synthetic probe
aaataaataaaaacataacctatctactaatacccaaaacctatacaaac

SEQ ID NO: 6564 - DNA, 50 bp, Artificial Sequence
  Description of Artificial Sequence: Synthetic probe
cacccttaataacttttaaaaccactcacaacctactaacttccttctac

SEQ ID NO: 6565 - DNA, 50 bp, Artificial Sequence
  Description of Artificial Sequence: Synthetic probe
caaaaacacacttacccaatatattaccctccattcccrctaaatacaac

SEQ ID NO: 6566 - DNA, 50 bp, Artificial Sequence
  Description of Artificial Sequence: Synthetic probe
aaataccaaacaaactactataatacaaatattaaaaaaattaaccaccc

SEQ ID NO: 6567 - DNA, 50 bp, Artificial Sequence
  Description of Artificial Sequence: Synthetic probe
aatctataaaacctaactcataatatcctaacttccctacatcccctaac

SEQ ID NO: 6568 - DNA, 50 bp, Artificial Sequence
  Description of Artificial Sequence: Synthetic probe
aatccaaactataataaaccacaaactctctcccactaaactaaaaaaac

SEQ ID NO: 6569 - DNA, 50 bp, Artificial Sequence
  Description of Artificial Sequence: Synthetic probe
atctataatttaccataacctaaactcactacatacaactcatactcctc

SEQ ID NO: 6570 - DNA, 50 bp, Artificial Sequence
  Description of Artificial Sequence: Synthetic probe
ccttctaaaccacaaacaacacatccacaaataaaaaccatcacatcatc

SEQ ID NO: 6571 - DNA, 50 bp, Artificial Sequence
  Description of Artificial Sequence: Synthetic probe
atttagtataggtgtaaaatygaaggttagtaaatagaagttgttattgt

SEQ ID NO: 6572 - DNA, 50 bp, Artificial Sequence
  Description of Artificial Sequence: Synthetic probe
ataaaaaccatcacatcatcracaataacaacttctatttactaaccttc

SEQ ID NO: 6573 - DNA, 50 bp, Artificial Sequence
  Description of Artificial Sequence: Synthetic probe
tccttaacttctaaaaactaaaaaccctaaaacacaacccaaaataaatc

SEQ ID NO: 6574 - DNA, 50 bp, Artificial Sequence
  Description of Artificial Sequence: Synthetic probe
actctactaaatcacatcttaaacatctacaaacaatctcctttattacc

SEQ ID NO: 6575 - DNA, 50 bp, Artificial Sequence
  Description of Artificial Sequence: Synthetic probe
ccaaaatacctaaacrtcaaacttctactctaaacccctttcctctaacc

SEQ ID NO: 6576 - DNA, 50 bp, Artificial Sequence
  Description of Artificial Sequence: Synthetic probe
catatcatatccctctcctaaaacaataaatccctccaaaatacctaaac

SEQ ID NO: 6577 - DNA, 50 bp, Artificial Sequence
  Description of Artificial Sequence: Synthetic probe
gatgttttttatttaagttaggatgggttatttaggatgggtattatatt

SEQ ID NO: 6578 - DNA, 50 bp, Artificial Sequence
  Description of Artificial Sequence: Synthetic probe
atactccttattcaaaccaaaataaactatccaaaataaacaccacaccc

SEQ ID NO: 6579 - DNA, 50 bp, Artificial Sequence
  Description of Artificial Sequence: Synthetic probe
tactatctatatcctacacactaaaactcctttcaaacaccataaaaaac

SEQ ID NO: 6580 - DNA, 50 bp, Artificial Sequence
  Description of Artificial Sequence: Synthetic probe
ctacaaaccaaacaatcccctaaatttaaactaaaaaactctaatctccc

SEQ ID NO: 6581 - DNA, 50 bp, Artificial Sequence
  Description of Artificial Sequence: Synthetic probe
ctccaacttaaacccaaaaaattacctaacctataactctaatcctaatc

SEQ ID NO: 6582 - DNA, 50 bp, Artificial Sequence
  Description of Artificial Sequence: Synthetic probe
ggtaatttaggattttaatgggtttttgtgtgaaagggatatagaagttt

SEQ ID NO: 6583 - DNA, 50 bp, Artificial Sequence
  Description of Artificial Sequence: Synthetic probe
aaaaattataaataaactccraaaacaaaaaactaaatctctacccatac

SEQ ID NO: 6584 - DNA, 50 bp, Artificial Sequence
  Description of Artificial Sequence: Synthetic probe
atccctttcacacaaaaacccattaaaatcctaaattaccccaacctaac

SEQ ID NO: 6585 - DNA, 50 bp, Artificial Sequence
  Description of Artificial Sequence: Synthetic probe
ctaaattaccccaacctaacrcataaataaaaactcaactctttactccc

SEQ ID NO: 6586 - DNA, 50 bp, Artificial Sequence
  Description of Artificial Sequence: Synthetic probe
atygagtttttagtagtttagattttatagaagagattgtgggtgggttt

SEQ ID NO: 6587 - DNA, 50 bp, Artificial Sequence
  Description of Artificial Sequence: Synthetic probe
tcatcctcctcctcatctatacttcaaaaatatcaaccccaactaaaatc

SEQ ID NO: 6588 - DNA, 50 bp, Artificial Sequence
  Description of Artificial Sequence: Synthetic probe
ccraaacccacccacaatctcttctataaaatctaaactactaaaaactc

SEQ ID NO: 6589 - DNA, 50 bp, Artificial Sequence
  Description of Artificial Sequence: Synthetic probe
aaactaaaatcacacacaaaactaaaaaccatcactatacctcatccttc

SEQ ID NO: 6590 - DNA, 50 bp, Artificial Sequence
  Description of Artificial Sequence: Synthetic probe
cctatatataacatcctataaatatcrtatatattaatccctctttatcc

SEQ ID NO: 6591 - DNA, 50 bp, Artificial Sequence
  Description of Artificial Sequence: Synthetic probe
agtttgtttagggataaaaatatagtgttgtatgttttattgaatagagg

SEQ ID NO: 6592 - DNA, 50 bp, Artificial Sequence
  Description of Artificial Sequence: Synthetic probe
cccracaccccaaaaccaaaataacaactaccaaccrttaatcatacttc

SEQ ID NO: 6593 - DNA, 50 bp, Artificial Sequence
  Description of Artificial Sequence: Synthetic probe
tacraaatataactaacractaacaattattattctaaccctaaaatacc

SEQ ID NO: 6594 - DNA, 50 bp, Artificial Sequence
  Description of Artificial Sequence: Synthetic probe
attagggattyggagaggggatgtaatttgtttagaattatatagtaaag

SEQ ID NO: 6595 - DNA, 50 bp, Artificial Sequence
  Description of Artificial Sequence: Synthetic probe
gtttaggggagaggttataggttttatattttaggttgtttttgtgaata

SEQ ID NO: 6596 - DNA, 50 bp, Artificial Sequence
  Description of Artificial Sequence: Synthetic probe
aaaaaccacrcctacaatttatatatttaccractaaaaaccaaaaactc

SEQ ID NO: 6597 - DNA, 50 bp, Artificial Sequence
  Description of Artificial Sequence: Synthetic probe
tagaggttaygtttgtaatttatgtatttatygattgggaattagggatt

SEQ ID NO: 6598 - DNA, 50 bp, Artificial Sequence
  Description of Artificial Sequence: Synthetic probe
tataattctaaacaaattacatcccctctccraatccctaattcccaatc

SEQ ID NO: 6599 - DNA, 50 bp, Artificial Sequence
  Description of Artificial Sequence: Synthetic probe
cttaaaccccaacactcatttcaaaaatcrtaaccaccaacaaaaaccac

SEQ ID NO: 6600 - DNA, 50 bp, Artificial Sequence
  Description of Artificial Sequence: Synthetic probe
acaaaatataaacaaaaaatccttaaaccccaacactcatttcaaaaatc

SEQ ID NO: 6601 - DNA, 50 bp, Artificial Sequence
  Description of Artificial Sequence: Synthetic probe
cccaatcrataaatacataaattacaaacrtaacctctattaataactac

SEQ ID NO: 6602 - DNA, 50 bp, Artificial Sequence
  Description of Artificial Sequence: Synthetic probe
actaaaaattttaatatatcctcatataaccttcttattaatataaactc

SEQ ID NO: 6603 - DNA, 50 bp, Artificial Sequence
  Description of Artificial Sequence: Synthetic probe
ccacraaaacactaataaaacraatataaaccctcacaacaccaaatcac

SEQ ID NO: 6604 - DNA, 50 bp, Artificial Sequence
  Description of Artificial Sequence: Synthetic probe
ccttcttattaatataaactcrtaacctaatactataaaaatccacactc

SEQ ID NO: 6605 - DNA, 50 bp, Artificial Sequence
  Description of Artificial Sequence: Synthetic probe
tatttactatttaatactacactcccctcccacraaaacactaataaaac

SEQ ID NO: 6606 - DNA, 50 bp, Artificial Sequence
  Description of Artificial Sequence: Synthetic probe
atttttttattagtgtggattygtgatttggtgttgtgagggtttatatt

SEQ ID NO: 6607 - DNA, 50 bp, Artificial Sequence
  Description of Artificial Sequence: Synthetic probe
aaaatcactcaaaacccaaacacatcctctttataatcaaaacacaaaac

SEQ ID NO: 6608 - DNA, 50 bp, Artificial Sequence
  Description of Artificial Sequence: Synthetic probe
catcttaaattcaataaattccrtcatctaaaaccaaaaatccctccccc

SEQ ID NO: 6609 - DNA, 50 bp, Artificial Sequence
  Description of Artificial Sequence: Synthetic probe
taaataacctccattataccacccctataatctccaacctcaataaaaac

SEQ ID NO: 6610 - DNA, 50 bp, Artificial Sequence
  Description of Artificial Sequence: Synthetic probe
aaaataaaaaaacaccraaccaaacccaacacracatccaaaaacaaacc

SEQ ID NO: 6611 - DNA, 50 bp, Artificial Sequence
  Description of Artificial Sequence: Synthetic probe
ccacccctataatctccaacctcaataaaaacratttatccctaaatacc

SEQ ID NO: 6612 - DNA, 50 bp, Artificial Sequence
  Description of Artificial Sequence: Synthetic probe
taagyggaagagttattgtagagtggagaagtatygaattaaatttaata

SEQ ID NO: 6613 - DNA, 50 bp, Artificial Sequence
  Description of Artificial Sequence: Synthetic probe
caacctcaataaaaacratttatccctaaataccrtattaaatttaattc

SEQ ID NO: 6614 - DNA, 50 bp, Artificial Sequence
  Description of Artificial Sequence: Synthetic probe
caaatttctccaaattcaccattaaaaaattcattaactctacctcactc

SEQ ID NO: 6615 - DNA, 50 bp, Artificial Sequence
  Description of Artificial Sequence: Synthetic probe
caaataaaaaaactaaaacctaaaaaaactctaaaacctactctaaactc

SEQ ID NO: 6616 - DNA, 50 bp, Artificial Sequence
  Description of Artificial Sequence: Synthetic probe
aaaaacatatttcttattcatatctatttaaaatacattccaaacacaac

SEQ ID NO: 6617 - DNA, 50 bp, Artificial Sequence
  Description of Artificial Sequence: Synthetic probe
cccaactaattttaactacaatttcaaaaataatataaccaatatatccc

SEQ ID NO: 6618 - DNA, 50 bp, Artificial Sequence
  Description of Artificial Sequence: Synthetic probe
tttttcctaaatttcctctcattcaaaaactataaatcccaaataatacc

SEQ ID NO: 6619 - DNA, 50 bp, Artificial Sequence
  Description of Artificial Sequence: Synthetic probe
ttttaatttttgaaagtttgttggaggtatttgagttatgagtggttatt

SEQ ID NO: 6620 - DNA, 50 bp, Artificial Sequence
  Description of Artificial Sequence: Synthetic probe
tttaacccttaaaaacctactaaaaacacctaaactataaataatcaccc

SEQ ID NO: 6621 - DNA, 50 bp, Artificial Sequence
  Description of Artificial Sequence: Synthetic probe
aacctacatccactatcactactactaaaccccatatcaaaatcaccaac

SEQ ID NO: 6622 - DNA, 50 bp, Artificial Sequence
  Description of Artificial Sequence: Synthetic probe
aaaataaacacctacracaaacattccaaaaaacatctaaatccrctatc

SEQ ID NO: 6623 - DNA, 50 bp, Artificial Sequence
  Description of Artificial Sequence: Synthetic probe
aaaccraaaataaacacctacracaaacattccaaaaaacatctaaatcc

SEQ ID NO: 6624 - DNA, 50 bp, Artificial Sequence
  Description of Artificial Sequence: Synthetic probe
cctttatactactttccacttactcaaacaaaccraaaataaacacctac

SEQ ID NO: 6625 - DNA, 50 bp, Artificial Sequence
  Description of Artificial Sequence: Synthetic probe
acccaccataaacaaatcctccaccaaacacccaaaaaaaactataattc

SEQ ID NO: 6626 - DNA, 50 bp, Artificial Sequence
  Description of Artificial Sequence: Synthetic probe
cttccctatccccaaatcaatttaactataaaaatatatcaccctaccac

SEQ ID NO: 6627 - DNA, 50 bp, Artificial Sequence
  Description of Artificial Sequence: Synthetic probe
ccccaaccaactaatacraaattacaactacctaactcctaatccatccc

SEQ ID NO: 6628 - DNA, 50 bp, Artificial Sequence
  Description of Artificial Sequence: Synthetic probe
caaccaactccaaaacaccacttattactaaacaactaaacttcrtactc

SEQ ID NO: 6629 - DNA, 50 bp, Artificial Sequence
  Description of Artificial Sequence: Synthetic probe
ctaacaaaaccaaactaacaactctaaccccrcataaatcaaaaactccc

SEQ ID NO: 6630 - DNA, 50 bp, Artificial Sequence
  Description of Artificial Sequence: Synthetic probe
ttctcaaaaaaataccctatacctactaaaaacactaccctcctacccac

SEQ ID NO: 6631 - DNA, 50 bp, Artificial Sequence
  Description of Artificial Sequence: Synthetic probe
ctccttttctaaaccatttaaaaataaattataatcatatccctttaccc

SEQ ID NO: 6632 - DNA, 50 bp, Artificial Sequence
  Description of Artificial Sequence: Synthetic probe
catttaaaaataaattataatcatatccctttacccrttaacatttcaac

SEQ ID NO: 6633 - DNA, 50 bp, Artificial Sequence
  Description of Artificial Sequence: Synthetic probe
taaaatctaccctttaaacaaaaatatcacacaaataatactatattatc

SEQ ID NO: 6634 - DNA, 50 bp, Artificial Sequence
  Description of Artificial Sequence: Synthetic probe
atattattagttygaggattttgatatattatgtgtttygatggaaggta

SEQ ID NO: 6635 - DNA, 50 bp, Artificial Sequence
  Description of Artificial Sequence: Synthetic probe
catcactaacccraaaactctaacacatcatataccccrataaaaaacac

SEQ ID NO: 6636 - DNA, 50 bp, Artificial Sequence
  Description of Artificial Sequence: Synthetic probe
tttaaacaaaaatatcacacaaataatactatattatcrtaccttccatc

SEQ ID NO: 6637 - DNA, 50 bp, Artificial Sequence
  Description of Artificial Sequence: Synthetic probe
aatcacaattaacatcactaacccraaaactctaacacatcatatacccc

SEQ ID NO: 6638 - DNA, 50 bp, Artificial Sequence
  Description of Artificial Sequence: Synthetic probe
ttttgggtaggaatattatataggtgatgttgtgttatygtgttttttat

SEQ ID NO: 6639 - DNA, 50 bp, Artificial Sequence
  Description of Artificial Sequence: Synthetic probe
tactatattatcrtaccttccatcraaacacataatatatcaaaatcctc

SEQ ID NO: 6640 - DNA, 50 bp, Artificial Sequence
  Description of Artificial Sequence: Synthetic probe
acctaacaaacaccactatcacaaataatcacaattaacatcactaaccc

SEQ ID NO: 6641 - DNA, 50 bp, Artificial Sequence
  Description of Artificial Sequence: Synthetic probe
atgttgtgttatygtgttttttatyggggtatatgatgtgttagagtttt

SEQ ID NO: 6642 - DNA, 50 bp, Artificial Sequence
  Description of Artificial Sequence: Synthetic probe
aattatatattaaatcttcctcaaactctcattaacaaattttaacaacc

SEQ ID NO: 6643 - DNA, 50 bp, Artificial Sequence
  Description of Artificial Sequence: Synthetic probe
agtgatatttaattttggtttaagttgtgaagttgttatttgaatgattg

SEQ ID NO: 6644 - DNA, 50 bp, Artificial Sequence
  Description of Artificial Sequence: Synthetic probe
ataatacctaatcctaacttaaattataaaattactacctaaataactac

SEQ ID NO: 6645 - DNA, 50 bp, Artificial Sequence
  Description of Artificial Sequence: Synthetic probe
attatagagtttggaagtagaagtatggattagtttagtattttttaaat

SEQ ID NO: 6646 - DNA, 50 bp, Artificial Sequence
  Description of Artificial Sequence: Synthetic probe
ctttaacccccaccaaactaacctccaactatataaacaccraaaacctc

SEQ ID NO: 6647 - DNA, 50 bp, Artificial Sequence
  Description of Artificial Sequence: Synthetic probe
aaaaattcacaaaccrttcaacaaaaattttctcaaaaaatatcatcccc

SEQ ID NO: 6648 - DNA, 50 bp, Artificial Sequence
  Description of Artificial Sequence: Synthetic probe
aacataaaataccccraaaataacaccccctaaaaaaacttctattaaac

SEQ ID NO: 6649 - DNA, 50 bp, Artificial Sequence
  Description of Artificial Sequence: Synthetic probe
acttaaaaataaccttttaactttttaccccttaacattaaaattcttcc

SEQ ID NO: 6650 - DNA, 50 bp, Artificial Sequence
  Description of Artificial Sequence: Synthetic probe
cctcactaaacctccaatcccctaaataaaaacttccaaaaaactaaacc

SEQ ID NO: 6651 - DNA, 50 bp, Artificial Sequence
  Description of Artificial Sequence: Synthetic probe
taaatctatcctatccccracccaaatacccaactcaatacatatttatc

SEQ ID NO: 6652 - DNA, 50 bp, Artificial Sequence
  Description of Artificial Sequence: Synthetic probe
ttaggggattggaggtttagtgaggttatttattggtttatttatgtatt

SEQ ID NO: 6653 - DNA, 50 bp, Artificial Sequence
  Description of Artificial Sequence: Synthetic probe
taactcattcatacattcracaaatatatactaaactaaacacctaaacc

SEQ ID NO: 6654 - DNA, 50 bp, Artificial Sequence
  Description of Artificial Sequence: Synthetic probe
actaccttaattaccctatctataaactaaacataatatcttccctatcc

SEQ ID NO: 6655 - DNA, 50 bp, Artificial Sequence
  Description of Artificial Sequence: Synthetic probe
actaaaaaactaacacraattcacacattaaaaaacaaaactaactaaac

SEQ ID NO: 6656 - DNA, 50 bp, Artificial Sequence
  Description of Artificial Sequence: Synthetic probe
aaaaactataaaactcccattcctaaaccccaaccatatataacccaaac

SEQ ID NO: 6657 - DNA, 50 bp, Artificial Sequence
  Description of Artificial Sequence: Synthetic probe
cccaactaaataaaaaatatttcttcccactcattcccataaaaccrctc

SEQ ID NO: 6658 - DNA, 50 bp, Artificial Sequence
  Description of Artificial Sequence: Synthetic probe
atttatagattaagttagatgatttgtttgtagagttttaggtgagtgat

SEQ ID NO: 6659 - DNA, 50 bp, Artificial Sequence
  Description of Artificial Sequence: Synthetic probe
ctcacaaactaaaccaaataacctacctacaaaacctcaaataaataacc

SEQ ID NO: 6660 - DNA, 50 bp, Artificial Sequence
  Description of Artificial Sequence: Synthetic probe
taatcccaactaaataaaaaatatttcttcccactcattcccataaaacc

SEQ ID NO: 6661 - DNA, 50 bp, Artificial Sequence
  Description of Artificial Sequence: Synthetic probe
atagattaagttagatgatttgtttgtagagttttaggtgagtgatygag

SEQ ID NO: 6662 - DNA, 50 bp, Artificial Sequence
  Description of Artificial Sequence: Synthetic probe
acaaaaacccaaaataaactatatatatacctcaaaaattattctacrac

SEQ ID NO: 6663 - DNA, 50 bp, Artificial Sequence
  Description of Artificial Sequence: Synthetic probe
ccatcaacttcctcctaattacaaaaataacctaaaaaacttaaacccac

SEQ ID NO: 6664 - DNA, 50 bp, Artificial Sequence
  Description of Artificial Sequence: Synthetic probe
ttaacaaaaacccaaaataaactatatatatacctcaaaaattattctac

SEQ ID NO: 6665 - DNA, 50 bp, Artificial Sequence
  Description of Artificial Sequence: Synthetic probe
crtaaaccaccacrcctaacttcaaactctacattttctaacaaacttcc

SEQ ID NO: 6666 - DNA, 50 bp, Artificial Sequence
  Description of Artificial Sequence: Synthetic probe
actctacattttctaacaaacttccraataatatcaattctaaaaaccac

SEQ ID NO: 6667 - DNA, 50 bp, Artificial Sequence
  Description of Artificial Sequence: Synthetic probe
aaaaaaccaccccatctaaatctaaacccacactactcaaaatactaacc

SEQ ID NO: 6668 - DNA, 50 bp, Artificial Sequence
  Description of Artificial Sequence: Synthetic probe
attaaatcraaaaatacataaaaattacccctaatacaatataaattctc

SEQ ID NO: 6669 - DNA, 50 bp, Artificial Sequence
  Description of Artificial Sequence: Synthetic probe
ttaaatcacaaactctctaaataaaaatcatctattaactaaccttcacc

SEQ ID NO: 6670 - DNA, 50 bp, Artificial Sequence
  Description of Artificial Sequence: Synthetic probe
ctcaataatcccacttctaattcaaaatttcacttctaaaacctatctcc

SEQ ID NO: 6671 - DNA, 50 bp, Artificial Sequence
  Description of Artificial Sequence: Synthetic probe
tcctataaaattaacaaccaaactaccaaactcctcacctccaacttcac

SEQ ID NO: 6672 - DNA, 50 bp, Artificial Sequence
  Description of Artificial Sequence: Synthetic probe
tcaaaactcttccaatcactcacaaaattacttccaaaacaaaacaactc

SEQ ID NO: 6673 - DNA, 50 bp, Artificial Sequence
  Description of Artificial Sequence: Synthetic probe
aaaaataaaaacaactccaaaccacacaacaaactaaaaccaactccccc

SEQ ID NO: 6674 - DNA, 50 bp, Artificial Sequence
  Description of Artificial Sequence: Synthetic probe
aaatccaatattaaatattaaaaataaattaccactaatctaaaactttc

SEQ ID NO: 6675 - DNA, 50 bp, Artificial Sequence
  Description of Artificial Sequence: Synthetic probe
aattttaatttacatcctaaaaatcttaacccttctcattacaccaaaac

SEQ ID NO: 6676 - DNA, 50 bp, Artificial Sequence
  Description of Artificial Sequence: Synthetic probe
agaatttagtgttaggtgttaaagatgaattattattgatttgagatttt

SEQ ID NO: 6677 - DNA, 50 bp, Artificial Sequence
  Description of Artificial Sequence: Synthetic probe
ataacaaaaataacaacatcttataaacaacrtcataattcaaacttaac

SEQ ID NO: 6678 - DNA, 50 bp, Artificial Sequence
  Description of Artificial Sequence: Synthetic probe
tttcaaaaaaaaccacctaataaaatacttatatatcctcccctaaaaac

SEQ ID NO: 6679 - DNA, 50 bp, Artificial Sequence
  Description of Artificial Sequence: Synthetic probe
ttccrtccctcctaattttataaaataatactcataaaaacccccacccc

SEQ ID NO: 6680 - DNA, 50 bp, Artificial Sequence
  Description of Artificial Sequence: Synthetic probe
gttttaattagaagattagaagttagttaggagttgggagtagtgttayg

SEQ ID NO: 6681 - DNA, 50 bp, Artificial Sequence
  Description of Artificial Sequence: Synthetic probe
acaacctctaaaacraactaaaaaattctacctaccratacaaaaccttc

SEQ ID NO: 6682 - DNA, 50 bp, Artificial Sequence
  Description of Artificial Sequence: Synthetic probe
ccatttccaaacraataaaaataaattataataacraccccraacractc

SEQ ID NO: 6683 - DNA, 50 bp, Artificial Sequence
  Description of Artificial Sequence: Synthetic probe
agtagtttttagaaygagttggaggattttgtttatygatatagagtttt

SEQ ID NO: 6684 - DNA, 50 bp, Artificial Sequence
  Description of Artificial Sequence: Synthetic probe
ttacattcacatctcttcacaaattaaactacaatttcrttatcataaac

SEQ ID NO: 6685 - DNA, 50 bp, Artificial Sequence
  Description of Artificial Sequence: Synthetic probe
taagatygtattaaaaattagtagagggttatattttattgggtataagt

SEQ ID NO: 6686 - DNA, 50 bp, Artificial Sequence
  Description of Artificial Sequence: Synthetic probe
ttacccaatttcattttcaatttaaaccaaaaatccccccaaattaatca

SEQ ID NO: 6687 - DNA, 50 bp, Artificial Sequence
  Description of Artificial Sequence: Synthetic probe
taatcraaacaaaaacaactcacaacratcaacaaacaaccccaaaaaac

SEQ ID NO: 6688 - DNA, 50 bp, Artificial Sequence
  Description of Artificial Sequence: Synthetic probe
atacaacataataaactaaccaaataacrtccctcctaaaaactaaaacc

SEQ ID NO: 6689 - DNA, 50 bp, Artificial Sequence
  Description of Artificial Sequence: Synthetic probe
aaaaaatcccttctaaccatcaatcataaaaataataacataacraatac

SEQ ID NO: 6690 - DNA, 50 bp, Artificial Sequence
  Description of Artificial Sequence: Synthetic probe
tttccaaatttatcattctcaaacaaaaactaaactcctccttttctcac

SEQ ID NO: 6691 - DNA, 50 bp, Artificial Sequence
  Description of Artificial Sequence: Synthetic probe
aaaaaatatataaattccrataaaaaaaacctaacaatcrcccccaaccc

SEQ ID NO: 6692 - DNA, 50 bp, Artificial Sequence
  Description of Artificial Sequence: Synthetic probe
tcaaaaaaataaacaatccccaaccctataactccccaatacaatcatca

SEQ ID NO: 6693 - DNA, 50 bp, Artificial Sequence
  Description of Artificial Sequence: Synthetic probe
aaaatcccaaaccccaaacataactctctaaatctcaaaccccaaaaaca

SEQ ID NO: 6694 - DNA, 50 bp, Artificial Sequence
  Description of Artificial Sequence: Synthetic probe
tttaggggagtgggtaatttttaattttgtgattttttagtgtagttatt

SEQ ID NO: 6695 - DNA, 50 bp, Artificial Sequence
  Description of Artificial Sequence: Synthetic probe
taatatccraatactaaaacratactcaataaaacctcctttcccctatc

SEQ ID NO: 6696 - DNA, 50 bp, Artificial Sequence
  Description of Artificial Sequence: Synthetic probe
ctctctaaaacatatactatatccactaaaaattaaataaattaaaaaca

SEQ ID NO: 6697 - DNA, 50 bp, Artificial Sequence
  Description of Artificial Sequence: Synthetic probe
ttaataaatacatccacatactaaaaaaataacacatcccacactccacc

SEQ ID NO: 6698 - DNA, 50 bp, Artificial Sequence
  Description of Artificial Sequence: Synthetic probe
tatttcaaatttattaaaatccatataacrtatctcaattatctctaaac

SEQ ID NO: 6699 - DNA, 50 bp, Artificial Sequence
  Description of Artificial Sequence: Synthetic probe
ttaattgagtgtggagattttgggttgtagaatttgtttaataaaagttg

SEQ ID NO: 6700 - DNA, 50 bp, Artificial Sequence
  Description of Artificial Sequence: Synthetic probe
taattaaatataaaaactctaaactacaaaatttacttaataaaaactac

SEQ ID NO: 6701 - DNA, 50 bp, Artificial Sequence
  Description of Artificial Sequence: Synthetic probe
aacracaacaacaacaaaaaccacaacccacattacttaaaaactcraac

SEQ ID NO: 6702 - DNA, 50 bp, Artificial Sequence
  Description of Artificial Sequence: Synthetic probe
crattctcraaccrttaaaaacccttttaaataacatcttataaatcctc

SEQ ID NO: 6703 - DNA, 50 bp, Artificial Sequence
  Description of Artificial Sequence: Synthetic probe
aaaaatatcactatctaaaataatccratcctacatacccaaaacataac

SEQ ID NO: 6704 - DNA, 50 bp, Artificial Sequence
  Description of Artificial Sequence: Synthetic probe
attaaaaaccttaacctattacatacctactttttactcaaccaaatacc

SEQ ID NO: 6705 - DNA, 50 bp, Artificial Sequence
  Description of Artificial Sequence: Synthetic probe
accaaaacatcctaaaaaataccrtataactaataacctcatctatccac

SEQ ID NO: 6706 - DNA, 50 bp, Artificial Sequence
  Description of Artificial Sequence: Synthetic probe
aaacataaaccaccrcrcctaaccaaaaataaacatttctaaacaacctc

SEQ ID NO: 6707 - DNA, 50 bp, Artificial Sequence
  Description of Artificial Sequence: Synthetic probe
aacactacctctaaaatatatatcraataaccrtaaccrataaaataatc

SEQ ID NO: 6708 - DNA, 50 bp, Artificial Sequence
  Description of Artificial Sequence: Synthetic probe
caaccactaaaatcccrctcaaaatcraatctaatcacaaaaaaaaatac

SEQ ID NO: 6709 - DNA, 50 bp, Artificial Sequence
  Description of Artificial Sequence: Synthetic probe
caaaaataaaaacttaactactacccrtaatattacctatttaactcccc

SEQ ID NO: 6710 - DNA, 50 bp, Artificial Sequence
  Description of Artificial Sequence: Synthetic probe
aaccaataaccaaaacttaaccaccaaaaactactcaccctcaataaacc

SEQ ID NO: 6711 - DNA, 50 bp, Artificial Sequence
  Description of Artificial Sequence: Synthetic probe
ttattattatygattagattyggttttgggagttggaaagggatagattt

SEQ ID NO: 6712 - DNA, 50 bp, Artificial Sequence
  Description of Artificial Sequence: Synthetic probe
aaactactaactacaaccttactactaacactactatcttactacctcac

SEQ ID NO: 6713 - DNA, 50 bp, Artificial Sequence
  Description of Artificial Sequence: Synthetic probe
caaaaattacaatatccraaaccraatacccactcctcraactaaacrcc

SEQ ID NO: 6714 - DNA, 50 bp, Artificial Sequence
  Description of Artificial Sequence: Synthetic probe
ctactcaaactaaaactttatatacatacctaccacataccaaccattcc

SEQ ID NO: 6715 - DNA, 50 bp, Artificial Sequence
  Description of Artificial Sequence: Synthetic probe
aaataacttaaaaaaaaacacacacaaacctactctacaactcataaaac

SEQ ID NO: 6716 - DNA, 50 bp, Artificial Sequence
  Description of Artificial Sequence: Synthetic probe
tgagtagtttgaggagagatatatatagatttattttgtagtttatgaga

SEQ ID NO: 6717 - DNA, 50 bp, Artificial Sequence
  Description of Artificial Sequence: Synthetic probe
cacatctacacatactataaacccttccrttaaaaataattttcacttac

SEQ ID NO: 6718 - DNA, 50 bp, Artificial Sequence
  Description of Artificial Sequence: Synthetic probe
aataaaaaaacatcaaacctactatcacrattctctcraaaaaaatttcc

SEQ ID NO: 6719 - DNA, 50 bp, Artificial Sequence
  Description of Artificial Sequence: Synthetic probe
taaattcctataaaaacactcaccrtaaattcaaacrcaacaacaaatac

SEQ ID NO: 6720 - DNA, 50 bp, Artificial Sequence
  Description of Artificial Sequence: Synthetic probe
ttggatttttatagaaatatttatygtgggtttagaygtagtaatagata

SEQ ID NO: 6721 - DNA, 50 bp, Artificial Sequence
  Description of Artificial Sequence: Synthetic probe
aaccaaccaaattaaccaatactaaatacatacataaacttactactccc

SEQ ID NO: 6722 - DNA, 50 bp, Artificial Sequence
  Description of Artificial Sequence: Synthetic probe
aatttggygagaaggtaagtgtgaattttattttgaggataatatttgag

SEQ ID NO: 6723 - DNA, 50 bp, Artificial Sequence
  Description of Artificial Sequence: Synthetic probe
ttacttctaatacctttatactccttatatctatacttcacaaaaatacc

SEQ ID NO: 6724 - DNA, 50 bp, Artificial Sequence
  Description of Artificial Sequence: Synthetic probe
aaataaaaaactaacttacttaaccrccactaaaaaattctaaataattc

SEQ ID NO: 6725 - DNA, 50 bp, Artificial Sequence
  Description of Artificial Sequence: Synthetic probe
aattttggttattatttattagyggagtgggtttaaattttagggygttt

SEQ ID NO: 6726 - DNA, 50 bp, Artificial Sequence
  Description of Artificial Sequence: Synthetic probe
aattcaatcaattctctaaaaactcacttataaatcaaaaaaatttttac

SEQ ID NO: 6727 - DNA, 50 bp, Artificial Sequence
  Description of Artificial Sequence: Synthetic probe
aaaaaaatcaacaaaatcaacctaaaaaccatctaaacracracrtcaac

SEQ ID NO: 6728 - DNA, 50 bp, Artificial Sequence
  Description of Artificial Sequence: Synthetic probe
aaactcccaaaataaaaactaactccraaactaactaactccrcaaatcc

SEQ ID NO: 6729 - DNA, 50 bp, Artificial Sequence
  Description of Artificial Sequence: Synthetic probe
aatctaaaaacaaatctacaaatctaatcactaatctcattaccaataac

SEQ ID NO: 6730 - DNA, 50 bp, Artificial Sequence
  Description of Artificial Sequence: Synthetic probe
ataactaaattttccaaataaaatcaacaatattatcaaaaccrtatctc

SEQ ID NO: 6731 - DNA, 50 bp, Artificial Sequence
  Description of Artificial Sequence: Synthetic probe
acrtctcccaccractctatctccacttaattacaataataaactacrac

SEQ ID NO: 6732 - DNA, 50 bp, Artificial Sequence
  Description of Artificial Sequence: Synthetic probe
cttaccccacttaactatcttaaactataacaaaatcacataattcacac

SEQ ID NO: 6733 - DNA, 50 bp, Artificial Sequence
  Description of Artificial Sequence: Synthetic probe
aaaccccttaaaaaatacaaactcccacctaacctaaatccrtaaacctc

SEQ ID NO: 6734 - DNA, 50 bp, Artificial Sequence
  Description of Artificial Sequence: Synthetic probe
tatttatacctatcctctaaaaaatatcaataacttccaaatactttaac

SEQ ID NO: 6735 - DNA, 50 bp, Artificial Sequence; identical to SEQ ID NO: 6734
  Description of Artificial Sequence: Synthetic probe

SEQ ID NO: 6736 - DNA, 50 bp, Artificial Sequence
  Description of Artificial Sequence: Synthetic probe
atttatacctatcctctaaaaaatatcaataacttccaaatactttaaca

SEQ ID NO: 6737 - DNA, 50 bp, Artificial Sequence; identical to SEQ ID NO: 6736
  Description of Artificial Sequence: Synthetic probe

SEQ ID NO: 6738 - DNA, 50 bp, Artificial Sequence; identical to SEQ ID NO: 6736
  Description of Artificial Sequence: Synthetic probe

SEQ ID NO: 6739 - DNA, 50 bp, Artificial Sequence; identical to SEQ ID NO: 6736
  Description of Artificial Sequence: Synthetic probe

SEQ ID NO: 6740 - DNA, 50 bp, Artificial Sequence
  Description of Artificial Sequence: Synthetic probe
caaaaaaaacctatattcattaacaataacttcccaatttctcccaaccc

SEQ ID NO: 6741 - DNA, 50 bp, Artificial Sequence
  Description of Artificial Sequence: Synthetic probe
aaccacttcacrataccatcttaacccatcaacaaaaaaatttttatccc

SEQ ID NO: 6742 - DNA, 50 bp, Artificial Sequence
  Description of Artificial Sequence: Synthetic probe
aaccctataaaaacccraaaataatcaaaactaaaaactcctaactaaac

SEQ ID NO: 6743 - DNA, 50 bp, Artificial Sequence
  Description of Artificial Sequence: Synthetic probe
aaaccacaacaactacctaacaacccraaaatacracaaataatcrctac

SEQ ID NO: 6744 - DNA, 50 bp, Artificial Sequence
  Description of Artificial Sequence: Synthetic probe
acraacaaatctctaaatactaaacratcataacrctactaaatatatac

SEQ ID NO: 6745 - DNA, 50 bp, Artificial Sequence
  Description of Artificial Sequence: Synthetic probe
atacctctaacaatctatcctataaatatatctccttaataaaatttcac

SEQ ID NO: 6746 - DNA, 50 bp, Artificial Sequence
  Description of Artificial Sequence: Synthetic probe
caaaaaccaatacraaactttaactccrattaaacracracccraaactc

SEQ ID NO: 6747 - DNA, 50 bp, Artificial Sequence
  Description of Artificial Sequence: Synthetic probe
atcatatacaaatttcctaattccracaataaattcaatacaattacttc

SEQ ID NO: 6748 - DNA, 50 bp, Artificial Sequence
  Description of Artificial Sequence: Synthetic probe
aatacactaaaattaccaatttattacaatcaaaaacttacctaatatac

SEQ ID NO: 6749 - DNA, 50 bp, Artificial Sequence
  Description of Artificial Sequence: Synthetic probe
aacaccaaaaacaccacacaaattttccaaataaatctacaaacactaca

SEQ ID NO: 6750 - DNA, 50 bp, Artificial Sequence
  Description of Artificial Sequence: Synthetic probe
catcctaattttcttccaaaatatttcctcctataaactatcccacccac

SEQ ID NO: 6751 - DNA, 50 bp, Artificial Sequence
  Description of Artificial Sequence: Synthetic probe
agatatttgagttatattaatttggtgtgaattttagttttgatgttgag

SEQ ID NO: 6752 - DNA, 50 bp, Artificial Sequence
  Description of Artificial Sequence: Synthetic probe
aacacctaaatcatatcaacctaatataaatcccaactctaatattaaac

SEQ ID NO: 6753 - DNA, 50 bp, Artificial Sequence
  Description of Artificial Sequence: Synthetic probe
atattaaacttaaatactattccctaaaaataactcctaaacttccaaac

SEQ ID NO: 6754 - DNA, 50 bp, Artificial Sequence
  Description of Artificial Sequence: Synthetic probe
aaacttcttaaaaaaatccaacctcaaaaatcaaaaaaaactcctaaacc

SEQ ID NO: 6755 - DNA, 50 bp, Artificial Sequence
  Description of Artificial Sequence: Synthetic probe
tygatggtttagtttatagttttagggagggaggagatttttagaatttt

SEQ ID NO: 6756 - DNA, 50 bp, Artificial Sequence
  Description of Artificial Sequence: Synthetic probe
tctcratatacaaaaactaataaaaaaatactttctccaacracaaaccc

SEQ ID NO: 6757 - DNA, 50 bp, Artificial Sequence
  Description of Artificial Sequence: Synthetic probe
tacaaaaactaataaaaaaatactttctccaacracaaacccraactaac

SEQ ID NO: 6758 - DNA, 50 bp, Artificial Sequence
  Description of Artificial Sequence: Synthetic probe
atacaaaaaccactttctactcccttcaaaaacaaccctatatcrtctac

SEQ ID NO: 6759 - DNA, 50 bp, Artificial Sequence
  Description of Artificial Sequence: Synthetic probe
attcttatacaaaaaccactttctactcccttcaaaaacaaccctatatc

SEQ ID NO: 6760 - DNA, 50 bp, Artificial Sequence
  Description of Artificial Sequence: Synthetic probe
ttaggatttaaggttttataagtatgagtagtttagttgggattattggt

SEQ ID NO: 6761 - DNA, 50 bp, Artificial Sequence
  Description of Artificial Sequence: Synthetic probe
taaaacccaaaatctcacaaatataaataacccaattaaaaccactaacc

SEQ ID NO: 6762 - DNA, 50 bp, Artificial Sequence
  Description of Artificial Sequence: Synthetic probe
actttaaaaataaaactttttaatcratcaaattccrcrccccccctccc

SEQ ID NO: 6763 - DNA, 50 bp, Artificial Sequence
  Description of Artificial Sequence: Synthetic probe
cacaaataaaaaactttaaaaataaaactttttaatcratcaaattccrc

SEQ ID NO: 6764 - DNA, 50 bp, Artificial Sequence
  Description of Artificial Sequence: Synthetic probe
atcacaaataaaaaactttaaaaataaaactttttaatcratcaaattcc

SEQ ID NO: 6765 - DNA, 50 bp, Artificial Sequence
  Description of Artificial Sequence: Synthetic probe
rtactccraaaaaaactatcaaaacctcactcctcttctacccaaacaac

SEQ ID NO: 6766 - DNA, 50 bp, Artificial Sequence
  Description of Artificial Sequence: Synthetic probe
raacatacratacataataaactaaccacaaccttaacaaaactctatcc

SEQ ID NO: 6767 - DNA, 50 bp, Artificial Sequence
  Description of Artificial Sequence: Synthetic probe
tggatatgtagtttagtaagttggagttttaygagttttattgtggtagt

SEQ ID NO: 6768 - DNA, 50 bp, Artificial Sequence
  Description of Artificial Sequence: Synthetic probe
aaacatacaactcaacaaactaaaactccacraatcctactataacaacc

SEQ ID NO: 6769 - DNA, 50 bp, Artificial Sequence
  Description of Artificial Sequence: Synthetic probe
raacaaaactctaccaaaactataaccaattcatcatacaccrcatactc

SEQ ID NO: 6770 - DNA, 50 bp, Artificial Sequence
  Description of Artificial Sequence: Synthetic probe
cctttcccraactaaacctattcactacracaaacatctctatactaaac

SEQ ID NO: 6771 - DNA, 50 bp, Artificial Sequence
  Description of Artificial Sequence: Synthetic probe
tccaccccaatttatatacttacctttcccraactaaacctattcactac

SEQ ID NO: 6772 - DNA, 50 bp, Artificial Sequence
  Description of Artificial Sequence: Synthetic probe
gtggttagtttattatgtatygtatgttygtttagtatagagatgtttgt

SEQ ID NO: 6773 - DNA, 50 bp, Artificial Sequence
  Description of Artificial Sequence: Synthetic probe
rcatactcrcccaacacaaaaatatctatcrcaataaacaaacccaactc

SEQ ID NO: 6774 - DNA, 50 bp, Artificial Sequence
  Description of Artificial Sequence: Synthetic probe
ygtatgttygtttagtatagagatgtttgtygtagtgaataggtttagtt

SEQ ID NO: 6775 - DNA, 50 bp, Artificial Sequence
  Description of Artificial Sequence: Synthetic probe
taaaataaccaaataaattaaaatctatacaacaaatacacttatcatcc

SEQ ID NO: 6776 - DNA, 50 bp, Artificial Sequence
  Description of Artificial Sequence: Synthetic probe
cttctccataacctctttactcaactttataataactaaactctaacccc

SEQ ID NO: 6777 - DNA, 50 bp, Artificial Sequence
  Description of Artificial Sequence: Synthetic probe
ttcttacctaccattctaaattcrtaccccaaaaacttataaaaaataac

SEQ ID NO: 6778 - DNA, 50 bp, Artificial Sequence
  Description of Artificial Sequence: Synthetic probe
atttttatttgttattttggattygtattttaaggatttgtggggagtaa

SEQ ID NO: 6779 - DNA, 50 bp, Artificial Sequence
  Description of Artificial Sequence: Synthetic probe
ttaagattttgggaatttaggtygtttagatttttaggtagaaaagttag

SEQ ID NO: 6780 - DNA, 50 bp, Artificial Sequence
  Description of Artificial Sequence: Synthetic probe
caaaaccttaaaaatccaaaccrcctaaatccccaaacaaaaaaaccaac

SEQ ID NO: 6781 - DNA, 50 bp, Artificial Sequence
  Description of Artificial Sequence: Synthetic probe
tccaaactaaaaaaaatactaacratatatataaataacactaccccctc

SEQ ID NO: 6782 - DNA, 50 bp, Artificial Sequence
  Description of Artificial Sequence: Synthetic probe
ataccccrcccctaaaaacrtaaccaataatcctattattaaaacrtacc

SEQ ID NO: 6783 - DNA, 50 bp, Artificial Sequence
  Description of Artificial Sequence: Synthetic probe
actcccraaaaaattaaacttataaaaatattctaaaaaaactcctacrc

SEQ ID NO: 6784 - DNA, 50 bp, Artificial Sequence
  Description of Artificial Sequence: Synthetic probe
atttactctatcatccccaacatattaccctcatcctcctaataaaaaac

SEQ ID NO: 6785 - DNA, 50 bp, Artificial Sequence
  Description of Artificial Sequence: Synthetic probe
aacccraaacraacraaaacaactataattacrtacraaaaaccrataac

SEQ ID NO: 6786 - DNA, 50 bp, Artificial Sequence
  Description of Artificial Sequence: Synthetic probe
catctcaaataataaacaaccaaacaaaaacactcctcacttcctaaaca

SEQ ID NO: 6787 - DNA, 50 bp, Artificial Sequence
  Description of Artificial Sequence: Synthetic probe
aaaacctcracaaaaaacracatataaacrccaaaaaacaaaaatttcac

SEQ ID NO: 6788 - DNA, 50 bp, Artificial Sequence
  Description of Artificial Sequence: Synthetic probe
acacctcaaaaaactctactcrcaaactatttacttccactttcatttcc

SEQ ID NO: 6789 - DNA, 50 bp, Artificial Sequence
  Description of Artificial Sequence: Synthetic probe
aaaaaaaccttcracataaacccaatccatctcccttcattattcattcc

SEQ ID NO: 6790 - DNA, 50 bp, Artificial Sequence
  Description of Artificial Sequence: Synthetic probe
caaatataaacaatatacctacaacaacaaaaattacatcaccctaaaca

SEQ ID NO: 6791 - DNA, 50 bp, Artificial Sequence
  Description of Artificial Sequence: Synthetic probe
caaatcaccaaacaaccaaactcactctcattaaaaaaaaactatacttc

SEQ ID NO: 6792 - DNA, 50 bp, Artificial Sequence
  Description of Artificial Sequence: Synthetic probe
aaaaaatttcccttttaaaatcttacratattaaataaaaccrccaaacc

SEQ ID NO: 6793 - DNA, 50 bp, Artificial Sequence
  Description of Artificial Sequence: Synthetic probe
tccaacacataaaccttccttaatttccrcctctcctactcataaaacac

SEQ ID NO: 6794 - DNA, 50 bp, Artificial Sequence
  Description of Artificial Sequence: Synthetic probe
cratactaatataacaaaatacrtaccccttaccttaaccacaaacaccc

SEQ ID NO: 6795 - DNA, 50 bp, Artificial Sequence
  Description of Artificial Sequence: Synthetic probe
gttattttttagttttgagtatttagggatataatgtattgtggaaggtt

SEQ ID NO: 6796 - DNA, 50 bp, Artificial Sequence
  Description of Artificial Sequence: Synthetic probe
aaaaacracacccraaaacrctcacctataaaaataaaactaaatcttcc

SEQ ID NO: 6797 - DNA, 50 bp, Artificial Sequence
  Description of Artificial Sequence: Synthetic probe
ygttgttttttgtttggttgagtattgyggagttttaygtttttaaattt

SEQ ID NO: 6798 - DNA, 50 bp, Artificial Sequence
  Description of Artificial Sequence: Synthetic probe
rttactccctacttaactaaacactacraaatttcacrcctctaaacccc

SEQ ID NO: 6799 - DNA, 50 bp, Artificial Sequence
  Description of Artificial Sequence: Synthetic probe
ataaatccaaattccaaaacrtctcraattacccaaaatttcccaataac

SEQ ID NO: 6800 - DNA, 50 bp, Artificial Sequence
  Description of Artificial Sequence: Synthetic probe
ttattttagggattagaaggagttaggagtaaagaattggtttatttggt

SEQ ID NO: 6801 - DNA, 50 bp, Artificial Sequence
  Description of Artificial Sequence: Synthetic probe
agtgggtttaaattttagggygtttygaattatttagaattttttagtgg

SEQ ID NO: 6802 - DNA, 50 bp, Artificial Sequence
  Description of Artificial Sequence: Synthetic probe
acaacaactcttccctattaatcttcactcaaaatttaaatcctcaaaac

SEQ ID NO: 6803 - DNA, 50 bp, Artificial Sequence
  Description of Artificial Sequence: Synthetic probe
acacaaaacctatcctccaccaacaaaaaaaatcttaaaatatacatcac

SEQ ID NO: 6804 - DNA, 50 bp, Artificial Sequence
  Description of Artificial Sequence: Synthetic probe
rataacttactcrcaaataaaaatcccctataaaataatctacaaaacrc

SEQ ID NO: 6805 - DNA, 50 bp, Artificial Sequence
  Description of Artificial Sequence: Synthetic probe
ctaaatcaaatactcrtttcatcaaacccrtctaaaaatcaaaatactcc

SEQ ID NO: 6806 - DNA, 50 bp, Artificial Sequence
  Description of Artificial Sequence: Synthetic probe
ttcaaaaatacrtacaaacttaaataactccraaccattaaaaaacctcc

SEQ ID NO: 6807 - DNA, 50 bp, Artificial Sequence
  Description of Artificial Sequence: Synthetic probe
gttgaattagatgttygttttattaggttygtttgaggattaaggtgttt

SEQ ID NO: 6808 - DNA, 50 bp, Artificial Sequence
  Description of Artificial Sequence: Synthetic probe
taaaatttataacrtcatcrttacractaaccaataaaaaaaactcccrc

SEQ ID NO: 6809 - DNA, 50 bp, Artificial Sequence
  Description of Artificial Sequence: Synthetic probe
tcccacrttctacacacctataaatcttaaaatataatcccttactcaac

SEQ ID NO: 6810 - DNA, 50 bp, Artificial Sequence
  Description of Artificial Sequence: Synthetic probe
aataaaaatattcccacccataacccctccaacttaccaaaactaaaacc

SEQ ID NO: 6811 - DNA, 50 bp, Artificial Sequence
  Description of Artificial Sequence: Synthetic probe
aaaatactaacrtccaaataacccraaaaatcctctaaaaatacaaaccc

SEQ ID NO: 6812 - DNA, 50 bp, Artificial Sequence
  Description of Artificial Sequence: Synthetic probe
taaaaacactatacatcaaccaaatttcattatcrtaaaaaccaattacc

SEQ ID NO: 6813 - DNA, 50 bp, Artificial Sequence
  Description of Artificial Sequence: Synthetic probe
taaaaaataaaaaactacatcaaaaaacaataacttcaccaataaacrcc

SEQ ID NO: 6814 - DNA, 50 bp, Artificial Sequence
  Description of Artificial Sequence: Synthetic probe
cctttaccrtcattcattcacttcatttcttcattcaacacaattttacc

SEQ ID NO: 6815 - DNA, 50 bp, Artificial Sequence
  Description of Artificial Sequence: Synthetic probe
cacttcatttcttcattcaacacaattttaccraacacatattttatacc

SEQ ID NO: 6816 - DNA, 50 bp, Artificial Sequence
  Description of Artificial Sequence: Synthetic probe
atatccctaattaaattaacccctttaaaattatccctcttccaaattcc

SEQ ID NO: 6817 - DNA, 50 bp, Artificial Sequence
  Description of Artificial Sequence: Synthetic probe
aaacaatactcaaaaatacataatcacataactaactataaaaaacaacc

SEQ ID NO: 6818 - DNA, 50 bp, Artificial Sequence
  Description of Artificial Sequence: Synthetic probe
caaatctaaaattcaacaaacactaattaaactcctactaaaaaatactc

SEQ ID NO: 6819 - DNA, 50 bp, Artificial Sequence
  Description of Artificial Sequence: Synthetic probe
taacaaacctaaaaatcrtacccttatcttccactacctatatcaatacc

SEQ ID NO: 6820 - DNA, 50 bp, Artificial Sequence
  Description of Artificial Sequence: Synthetic probe
tcaactactcttaaaaaaacaaaaacctttacaacrtccataacttattc

SEQ ID NO: 6821 - DNA, 50 bp, Artificial Sequence
  Description of Artificial Sequence: Synthetic probe
ttctaacaaaaacttaatcaatatttattaaactctaaatctataatcac

SEQ ID NO: 6822 - DNA, 50 bp, Artificial Sequence
  Description of Artificial Sequence: Synthetic probe
caaaaaaattaaattattcttaaacttaacatcaactctacttttaaaac

SEQ ID NO: 6823 - DNA, 50 bp, Artificial Sequence
  Description of Artificial Sequence: Synthetic probe
rtccaaaataaaccccacttcccctaaacttattaattctctaaaaaaac

SEQ ID NO: 6824 - DNA, 50 bp, Artificial Sequence
  Description of Artificial Sequence: Synthetic probe
aaaacraataaaaatcttattatttccttctaccccaacaaaccctccac

SEQ ID NO: 6825 - DNA, 50 bp, Artificial Sequence
  Description of Artificial Sequence: Synthetic probe
tacaaatcccacaacctcatcttaaatctaacctactcctcctaaaaaac

SEQ ID NO: 6826 - DNA, 50 bp, Artificial Sequence
  Description of Artificial Sequence: Synthetic probe
ttcatccactcatttatccaacttttctttcaataaatatatttatctcc

SEQ ID NO: 6827 - DNA, 50 bp, Artificial Sequence
  Description of Artificial Sequence: Synthetic probe
attaaaaactaaaaacttaaacacttccraatcctactaaatatatcctc

SEQ ID NO: 6828 - DNA, 50 bp, Artificial Sequence
  Description of Artificial Sequence: Synthetic probe
tccccraaataaaactacaaatcccaaaaaatcttcctcaacrcraaatc

SEQ ID NO: 6829 - DNA, 50 bp, Artificial Sequence
  Description of Artificial Sequence: Synthetic probe
gttgaaaggggatagttggagttaaataatttaatttaaatatttgggaa

SEQ ID NO: 6830 - DNA, 50 bp, Artificial Sequence
  Description of Artificial Sequence: Synthetic probe
crtacraacattaattaactaaaatcrcctatctcracaatctcccctac

SEQ ID NO: 6831 - DNA, 50 bp, Artificial Sequence
  Description of Artificial Sequence: Synthetic probe
ttattttgataaagagygtggatttttaaagaaagggtttttagatattt

SEQ ID NO: 6832 - DNA, 50 bp, Artificial Sequence
  Description of Artificial Sequence: Synthetic probe
tactctaacaaaaaacrtaaattcccaaaaaaaaaatccccaaatacccc

SEQ ID NO: 6833 - DNA, 50 bp, Artificial Sequence
  Description of Artificial Sequence: Synthetic probe
ttcataaaccctaaatttatcctccctacacraaaataaacacaaaacac

SEQ ID NO: 6834 - DNA, 50 bp, Artificial Sequence
  Description of Artificial Sequence: Synthetic probe
ctctcrctacaacttcctaaaaactaactaattaactcccatatccrtcc

SEQ ID NO: 6835 - DNA, 50 bp, Artificial Sequence
  Description of Artificial Sequence: Synthetic probe
ctatatatattttaaaaacatacatttcattaaataaacactatcattcc

SEQ ID NO: 6836 - DNA, 50 bp, Artificial Sequence
  Description of Artificial Sequence: Synthetic probe
aatttggaatgttatatttgagaagatggttattgtgaataagtgataaa

SEQ ID NO: 6837 - DNA, 50 bp, Artificial Sequence
  Description of Artificial Sequence: Synthetic probe
ataacttaaatacccctaataatatatacaaaccttcccaaaaatatatc

SEQ ID NO: 6838 - DNA, 50 bp, Artificial Sequence
  Description of Artificial Sequence: Synthetic probe
raaaaacacatattaatctaaaaactaattcccttaaaactaatcctacc

SEQ ID NO: 6839 - DNA, 50 bp, Artificial Sequence
  Description of Artificial Sequence: Synthetic probe
tatggtttggatatttttagtggtatatgtaaatttttttaggggtgtgt

SEQ ID NO: 6840 - DNA, 50 bp, Artificial Sequence
  Description of Artificial Sequence: Synthetic probe
acaaaaaataaaacttctacaatttctatttccttaactaacaactcaac

SEQ ID NO: 6841 - DNA, 50 bp, Artificial Sequence
  Description of Artificial Sequence: Synthetic probe
cacattacttaaaaactcraacrtacrcaaaactccraattcaatttccc

SEQ ID NO: 6842 - DNA, 50 bp, Artificial Sequence
  Description of Artificial Sequence: Synthetic probe
acctaaacrcrcraaactttactcrtttactattaaaaaaattccaacrc

SEQ ID NO: 6843 - DNA, 50 bp, Artificial Sequence
  Description of Artificial Sequence: Synthetic probe
tyggtaggtagaattttttagttygttttagaggttgttttattttagta

SEQ ID NO: 6844 - DNA, 50 bp, Artificial Sequence
  Description of Artificial Sequence: Synthetic probe
crataaacaaaatcctccaactcrttctaaaaactactccactccaacac

SEQ ID NO: 6845 - DNA, 50 bp, Artificial Sequence
  Description of Artificial Sequence: Synthetic probe
tctcrctattcctaatcctaataatcctctcctctcttaataaaaaaaac

SEQ ID NO: 6846 - DNA, 50 bp, Artificial Sequence
  Description of Artificial Sequence: Synthetic probe
atataatatattaaatataaaactaactacaacrtcaactaacaaataac

SEQ ID NO: 6847 - DNA, 50 bp, Artificial Sequence
  Description of Artificial Sequence: Synthetic probe
cctactcaaacttacrttttctaacttaaaatacaatactccrctctcac

SEQ ID NO: 6848 - DNA, 50 bp, Artificial Sequence
  Description of Artificial Sequence: Synthetic probe
taaaccatttaacttcctaacttcctctaaaaaaaaacttttccaaaccc

SEQ ID NO: 6849 - DNA, 50 bp, Artificial Sequence
  Description of Artificial Sequence: Synthetic probe
tcatcactaattattctaaaactactttcctccacaacatcttacrtaac

SEQ ID NO: 6850 - DNA, 50 bp, Artificial Sequence
  Description of Artificial Sequence: Synthetic probe
tattaaccctttaatactatacacctcataaaattattacccacatcaac

SEQ ID NO: 6851 - DNA, 50 bp, Artificial Sequence
  Description of Artificial Sequence: Synthetic probe
tattaaccaaattaatcttaaactcctaacctcataatctacctacctca

SEQ ID NO: 6852 - DNA, 50 bp, Artificial Sequence
  Description of Artificial Sequence: Synthetic probe
aacttctaccatccacctacatctcttcttaaccctaaccaaaataaacc

SEQ ID NO: 6853 - DNA, 50 bp, Artificial Sequence
  Description of Artificial Sequence: Synthetic probe
acttctaccatccacctacatctcttcttaaccctaaccaaaataaacca

SEQ ID NO: 6854 - DNA, 50 bp, Artificial Sequence
  Description of Artificial Sequence: Synthetic probe
tgatgggataagttgtttaaaaatgagagggtaggattaagtttgagatt

SEQ ID NO: 6855 - DNA, 50 bp, Artificial Sequence
  Description of Artificial Sequence: Synthetic probe
tttaaaacaaaatttcactcttattacccaaactaaaacacaataataca

SEQ ID NO: 6856 - DNA, 50 bp, Artificial Sequence
  Description of Artificial Sequence: Synthetic probe
acracttataaaactacccrtccacttactctttttacrattctacaaac

SEQ ID NO: 6857 - DNA, 50 bp, Artificial Sequence
  Description of Artificial Sequence: Synthetic probe
ttttctatattaatcaaactaatctcaaactcccaacctcaaataatcca

SEQ ID NO: 6858 - DNA, 50 bp, Artificial Sequence
  Description of Artificial Sequence: Synthetic probe
tctacrctaactccttcaatctttaaaatatattacaataaccactatac

SEQ ID NO: 6859 - DNA, 50 bp, Artificial Sequence
  Description of Artificial Sequence: Synthetic probe
aaaaaaaataatcaacrtaaataaacaaatatacrataaaattccccctc

SEQ ID NO: 6860 - DNA, 50 bp, Artificial Sequence
  Description of Artificial Sequence: Synthetic probe
taacrtaattacaactcaaaaacctaaacccttacraacccttccraaac

SEQ ID NO: 6861 - DNA, 50 bp, Artificial Sequence
  Description of Artificial Sequence: Synthetic probe
cattttacratacraaaactacacaacaacacrtataaaaaactctcccc

SEQ ID NO: 6862 - DNA, 50 bp, Artificial Sequence
  Description of Artificial Sequence: Synthetic probe
ttctaaacctccctaaaatctaactcatctaacctctccaaaataaaaac

SEQ ID NO: 6863 - DNA, 50 bp, Artificial Sequence
  Description of Artificial Sequence: Synthetic probe
taataaactaaaaaacccraactccaaacttcatcataatcataatcccc

SEQ ID NO: 6864 - DNA, 50 bp, Artificial Sequence
  Description of Artificial Sequence: Synthetic probe
taaataacaaaaaaactcaacrtcractaaaacrcrtaatcctttataac

SEQ ID NO: 6865 - DNA, 50 bp, Artificial Sequence
  Description of Artificial Sequence: Synthetic probe
acaaaactaactccttacccaaccaccattataactaaacatataaaatc

SEQ ID NO: 6866 - DNA, 50 bp, Artificial Sequence
  Description of Artificial Sequence: Synthetic probe
accaaacrtaccttaaaaacraaaccaaaactacrtccttaactaacctc

SEQ ID NO: 6867 - DNA, 50 bp, Artificial Sequence
  Description of Artificial Sequence: Synthetic probe
ctcraatatcraaaaacractcccraaaacaactatcraaaacctattcc

SEQ ID NO: 6868 - DNA, 50 bp, Artificial Sequence
  Description of Artificial Sequence: Synthetic probe
tttacaaaattttaaatttcctattaaaactaaactacaattaaccaaac

SEQ ID NO: 6869 - DNA, 50 bp, Artificial Sequence
  Description of Artificial Sequence: Synthetic probe
ttttgtaagattttagattttttattgaaattgagttatagttggttagg

SEQ ID NO: 6870 - DNA, 50 bp, Artificial Sequence
  Description of Artificial Sequence: Synthetic probe
atacctaaacccaactcaaatctttctaaaactaaaaacaccraaactac

SEQ ID NO: 6871 - DNA, 50 bp, Artificial Sequence
  Description of Artificial Sequence: Synthetic probe
tgtgtttaaatttagtttaggtttttttgaagttaggagtatyggaatta

SEQ ID NO: 6872 - DNA, 50 bp, Artificial Sequence
  Description of Artificial Sequence: Synthetic probe
aaaaaaacaacctctaccataaaaaacaaaaaatccacctaactaaaaca

SEQ ID NO: 6873 - DNA, 50 bp, Artificial Sequence
  Description of Artificial Sequence: Synthetic probe
acctactaaaaccactaatatcaaccctaaaattttcctttaatcacacc

SEQ ID NO: 6874 - DNA, 50 bp, Artificial Sequence
  Description of Artificial Sequence: Synthetic probe
aacaaacctcaaactttcaacttataaacaccccaacctaaaataaacac

SEQ ID NO: 6875 - DNA, 50 bp, Artificial Sequence
  Description of Artificial Sequence: Synthetic probe
taaacacracctataaaaccttttacccctataaaatctttactaaacac

SEQ ID NO: 6876 - DNA, 50 bp, Artificial Sequence
  Description of Artificial Sequence: Synthetic probe
ctaaactactcaaacacctacaaacacaaaacraaaaataaaaccacatc

SEQ ID NO: 6877 - DNA, 50 bp, Artificial Sequence
  Description of Artificial Sequence: Synthetic probe
ttaaagaaaaygggaagtgggagtagttggaaatatatttaagagttaag

SEQ ID NO: 6878 - DNA, 50 bp, Artificial Sequence
  Description of Artificial Sequence: Synthetic probe
atacctaaatctttaatttccaatttacraatccactaccctctacttac

SEQ ID NO: 6879 - DNA, 50 bp, Artificial Sequence
  Description of Artificial Sequence: Synthetic probe
ttttttatgagtttatttttggggttattaaaggtgattagagtagagtt

SEQ ID NO: 6880 - DNA, 50 bp, Artificial Sequence
  Description of Artificial Sequence: Synthetic probe
rtacttattataaaaaatcacrttttacaacatcttaaccrcaaaaaacc

SEQ ID NO: 6881 - DNA, 50 bp, Artificial Sequence
  Description of Artificial Sequence: Synthetic probe
ygtatttattgtggggagttaygttttgtagtattttgatygtaaggaat

SEQ ID NO: 6882 - DNA, 50 bp, Artificial Sequence
  Description of Artificial Sequence: Synthetic probe
ctaacatcaaaaactaaaatccraactatataacatccctataatcactc

SEQ ID NO: 6883 - DNA, 50 bp, Artificial Sequence
  Description of Artificial Sequence: Synthetic probe
taacatcaaaaactaaaatccaaactatataacatccctataatcactca

SEQ ID NO: 6884 - DNA, 50 bp, Artificial Sequence
  Description of Artificial Sequence: Synthetic probe
tctcaatttaccrctttataaaataaacacaataacaatctccactctcc

SEQ ID NO: 6885 - DNA, 50 bp, Artificial Sequence
  Description of Artificial Sequence: Synthetic probe
caccrcrctaaacratttattaaatacttttaaatactaccaacttcccc

SEQ ID NO: 6886 - DNA, 50 bp, Artificial Sequence
  Description of Artificial Sequence: Synthetic probe
caaaatcccrctctaaactccaaaaactcctcrtattataaaaactttcc

SEQ ID NO: 6887 - DNA, 50 bp, Artificial Sequence
  Description of Artificial Sequence: Synthetic probe
ggaattttagtygttattttattaaagggttttagygtttagaggggttg

SEQ ID NO: 6888 - DNA, 50 bp, Artificial Sequence
  Description of Artificial Sequence: Synthetic probe
ctcttaaaacatccaaatattctaacatttaacctaactccaacctcaac

SEQ ID NO: 6889 - DNA, 50 bp, Artificial Sequence
  Description of Artificial Sequence: Synthetic probe
aaaaaatttaaaatttaccccrattccactactaatcccctcccaaattc

SEQ ID NO: 6890 - DNA, 50 bp, Artificial Sequence
  Description of Artificial Sequence: Synthetic probe
aaactctactttaaaccrcttatcaaataccccaaacttttcatcraatc

SEQ ID NO: 6891 - DNA, 50 bp, Artificial Sequence
  Description of Artificial Sequence: Synthetic probe
acracrcatacaaaaaaaacrccraacaacctatactaaaaaactcaaac

SEQ ID NO: 6892 - DNA, 50 bp, Artificial Sequence
  Description of Artificial Sequence: Synthetic probe
aataaacaactaaatacattcaaccataaaaccaaacccaccaccaaaac

SEQ ID NO: 6893 - DNA, 50 bp, Artificial Sequence
  Description of Artificial Sequence: Synthetic probe
ccttccaaaaaaaaacrccatctcccctcraaaaacaaaactttatctcc

SEQ ID NO: 6894 - DNA, 50 bp, Artificial Sequence
  Description of Artificial Sequence: Synthetic probe
aaacaaacaaaacaaaacataccttaaaactaatctctttcctaaataac

SEQ ID NO: 6895 - DNA, 50 bp, Artificial Sequence
  Description of Artificial Sequence: Synthetic probe
ttaattatttttcccaaatacrtacacaaatttattttctccctaataac

SEQ ID NO: 6896 - DNA, 50 bp, Artificial Sequence
  Description of Artificial Sequence: Synthetic probe
aataaaaaataccccrccctttatacaaattaaaaaacrtatctaaacrc

SEQ ID NO: 6897 - DNA, 50 bp, Artificial Sequence
  Description of Artificial Sequence: Synthetic probe
taaataaacttaaacacaaaatacctaaactcaaatttaaaaaattcatc

SEQ ID NO: 6898 - DNA, 50 bp, Artificial Sequence
  Description of Artificial Sequence: Synthetic probe
tcacaattttaatcaaaaatcactaaaaattcattcrtaataactaccac

SEQ ID NO: 6899 - DNA, 50 bp, Artificial Sequence
  Description of Artificial Sequence: Synthetic probe
aaaattaactaaatacccrctctataccaaacrcrttctcaataataaac

SEQ ID NO: 6900 - DNA, 50 bp, Artificial Sequence
  Description of Artificial Sequence: Synthetic probe
tacaacatctccraaacctacractcrcactaaaaaatcctaaaaaaaac

SEQ ID NO: 6901 - DNA, 50 bp, Artificial Sequence
  Description of Artificial Sequence: Synthetic probe
acaaaatacacraatattacccttaaattcctacaactaattatacaatc

SEQ ID NO: 6902 - DNA, 50 bp, Artificial Sequence
  Description of Artificial Sequence: Synthetic probe
actaactaaacraaaaaaacrtcttcataaactaaaaataaaacrccrac

SEQ ID NO: 6903 - DNA, 50 bp, Artificial Sequence
  Description of Artificial Sequence: Synthetic probe
caaaaacctacaattatctttatacttaaatactatccttcraaaatccc

SEQ ID NO: 6904 - DNA, 50 bp, Artificial Sequence
  Description of Artificial Sequence: Synthetic probe
aaaacraactaaaaaattctacctaccratacaaaaccttcraatcrtcc

SEQ ID NO: 6905 - DNA, 50 bp, Artificial Sequence
  Description of Artificial Sequence: Synthetic probe
taacctaattaaacaaacaaccraaatactttataaattaatccacrccc

SEQ ID NO: 6906 - DNA, 50 bp, Artificial Sequence
  Description of Artificial Sequence: Synthetic probe
taaaaatacccraattaaaacaataccccrctacaaaaatataaaacatc

SEQ ID NO: 6907 - DNA, 50 bp, Artificial Sequence
  Description of Artificial Sequence: Synthetic probe
aaaaaaaaaatatcataactcatcctccaatttccaaataaaaaccttcc

SEQ ID NO: 6908 - DNA, 50 bp, Artificial Sequence
  Description of Artificial Sequence: Synthetic probe
acaaatactaaactcaatactttacccctattcttccaataaattatccc

SEQ ID NO: 6909 - DNA, 50 bp, Artificial Sequence
  Description of Artificial Sequence: Synthetic probe
aacctcaatttcctcatctaataaataacaattcttacctcaaaattacc

SEQ ID NO: 6910 - DNA, 50 bp, Artificial Sequence
  Description of Artificial Sequence: Synthetic probe
aactaaacrccataacrcaaacrctacaaaaacaaaataatacctttaac

SEQ ID NO: 6911 - DNA, 50 bp, Artificial Sequence
  Description of Artificial Sequence: Synthetic probe
taacraaaacraaattatatacaccaaactaaatcctactacaaatttcc

SEQ ID NO: 6912 - DNA, 50 bp, Artificial Sequence
  Description of Artificial Sequence: Synthetic probe
caccatattaaccaaaataatcttaatctcctaacctcataatctaccca

SEQ ID NO: 6913 - DNA, 50 bp, Artificial Sequence
  Description of Artificial Sequence: Synthetic probe
tattaaccaaaataatcttaatctcctaacctcataatctacccacctca

SEQ ID NO: 6914 - DNA, 50 bp, Artificial Sequence
  Description of Artificial Sequence: Synthetic probe
aaaaccaataaaaaattatactttactaaacacaaatcrtttataataac

SEQ ID NO: 6915 - DNA, 50 bp, Artificial Sequence
  Description of Artificial Sequence: Synthetic probe
tacraataacrtaaaaaaaaccraccrctaaaaaacttttaaaaacrcrc

SEQ ID NO: 6916 - DNA, 50 bp, Artificial Sequence
  Description of Artificial Sequence: Synthetic probe
ccaccctctacaactaacatatctttaaactacaaatcattaacaaaatc

SEQ ID NO: 6917 - DNA, 50 bp, Artificial Sequence
  Description of Artificial Sequence: Synthetic probe
caataccactaaaaaaccttcacccaaatctctccaaaaaacctcaaacc

SEQ ID NO: 6918 - DNA, 50 bp, Artificial Sequence
  Description of Artificial Sequence: Synthetic probe
tttgtaggaggtagtattttggtattgaatatagaattaagtaaaggtag

SEQ ID NO: 6919 - DNA, 50 bp, Artificial Sequence
  Description of Artificial Sequence: Synthetic probe
tttcacctctcttaaaaaataacaaaaaccttccraaacaacctcraacc

SEQ ID NO: 6920 - DNA, 50 bp, Artificial Sequence
  Description of Artificial Sequence: Synthetic probe
aatcaacacataaaaaaaacraacaacccaacacraaacrctaactcacc

SEQ ID NO: 6921 - DNA, 50 bp, Artificial Sequence
  Description of Artificial Sequence: Synthetic probe
gtggtagtyggatagagttttgttaaggttgtggttagtttattatgtat

SEQ ID NO: 6922 - DNA, 50 bp, Artificial Sequence
  Description of Artificial Sequence: Synthetic probe
taacaaccraacaaaactctaccaaaactataaccaattcatcatacacc

SEQ ID NO: 6923 - DNA, 50 bp, Artificial Sequence
  Description of Artificial Sequence: Synthetic probe
acraaacaatcctactaataaaaaccctaaaaatttcccaacttatatac

SEQ ID NO: 6924 - DNA, 50 bp, Artificial Sequence
  Description of Artificial Sequence: Synthetic probe
tatcaccaactactaatttacacataccaaaaacataaacattttccaac

SEQ ID NO: 6925 - DNA, 50 bp, Artificial Sequence
  Description of Artificial Sequence: Synthetic probe
aaaaataatactaaaaaaccttaaaccccccataattacccractaattc

SEQ ID NO: 6926 - DNA, 50 bp, Artificial Sequence
  Description of Artificial Sequence: Synthetic probe
tttttaaaaatggtttttggatttttaggyggtgaggattttgtaaatag

SEQ ID NO: 6927 - DNA, 50 bp, Artificial Sequence
  Description of Artificial Sequence: Synthetic probe
ccctaaaaataactcctaaacttccaaacrataaaaaccttacaaacaac

SEQ ID NO: 6928 - DNA, 50 bp, Artificial Sequence
  Description of Artificial Sequence: Synthetic probe
taacaaacaaaaaattataacaactataacttccataataaaaacctcac

SEQ ID NO: 6929 - DNA, 50 bp, Artificial Sequence
  Description of Artificial Sequence: Synthetic probe
tcaactttttactcaaaaacctcaactataaatacaacrcttaaaaaaac

SEQ ID NO: 6930 - DNA, 50 bp, Artificial Sequence
  Description of Artificial Sequence: Synthetic probe
tattcaattaatcccattcaataatcaaatttctatattttattcaaaac

SEQ ID NO: 6931 - DNA, 50 bp, Artificial Sequence
  Description of Artificial Sequence: Synthetic probe
actccaatcrcrtaaacacataacrtttacractatctaaaaaacctaac

SEQ ID NO: 6932 - DNA, 50 bp, Artificial Sequence
  Description of Artificial Sequence: Synthetic probe
aaaattattatattcattccttaaatctcrcracrtcraaaaatcacrac

SEQ ID NO: 6933 - DNA, 50 bp, Artificial Sequence
  Description of Artificial Sequence: Synthetic probe
tacaataatactatctcaactcactacaaactctacctcctaaattcaca

SEQ ID NO: 6934 - DNA, 50 bp, Artificial Sequence
  Description of Artificial Sequence: Synthetic probe
caaaaaaccttatataccraactctactttctatcataaataatcacaac

SEQ ID NO: 6935 - DNA, 50 bp, Artificial Sequence
  Description of Artificial Sequence: Synthetic probe
ttttataccccaaaacataaatttcaaccactaaaatcccrctcaaaatc

SEQ ID NO: 6936 - DNA, 50 bp, Artificial Sequence
  Description of Artificial Sequence: Synthetic probe
attttgtgttttagaatatgagttttagttattagggtttygtttagggt

SEQ ID NO: 6937 - DNA, 50 bp, Artificial Sequence
  Description of Artificial Sequence: Synthetic probe
taataaatttctaaaatcrtcacctaatcccraaactccttcraacacac

SEQ ID NO: 6938 - DNA, 50 bp, Artificial Sequence
  Description of Artificial Sequence: Synthetic probe
atctactcaaatacaaatcctaaaatttttaatcaataaactctatcttc

SEQ ID NO: 6939 - DNA, 50 bp, Artificial Sequence
  Description of Artificial Sequence: Synthetic probe
aataaaccacaaataattaatttatttctaactctcaacccrtctctcac

SEQ ID NO: 6940 - DNA, 50 bp, Artificial Sequence
  Description of Artificial Sequence: Synthetic probe
aacaaccttctctctactaatcccaactttacatactaaacactcttacc

SEQ ID NO: 6941 - DNA, 50 bp, Artificial Sequence
  Description of Artificial Sequence: Synthetic probe
acaaccttctctctactaatcccaactttacatactaaacactcttacca

SEQ ID NO: 6942 - DNA, 50 bp, Artificial Sequence
  Description of Artificial Sequence: Synthetic probe
atatctataaaaataaaaactataatctataccctctaccaaacrtttac

SEQ ID NO: 6943 - DNA, 50 bp, Artificial Sequence
  Description of Artificial Sequence: Synthetic probe
ctaaaataaaaccaaataacaaaaaatttctaataaaccttcrcractcc

SEQ ID NO: 6944 - DNA, 50 bp, Artificial Sequence
  Description of Artificial Sequence: Synthetic probe
ttcccaacatccaaacccacacaataattacctctataaaaaaattctca

SEQ ID NO: 6945 - DNA, 50 bp, Artificial Sequence
  Description of Artificial Sequence: Synthetic probe
atttaaggagtattaagataaaaggtggaattgttaaggttaatttagat

SEQ ID NO: 6946 - DNA, 50 bp, Artificial Sequence
  Description of Artificial Sequence: Synthetic probe
tacrtaaaaaatataaatacaaacaccaatacaccrataaacacrtctcc

SEQ ID NO: 6947 - DNA, 50 bp, Artificial Sequence
  Description of Artificial Sequence: Synthetic probe
tacccaaatctatacaaaccaaaaataatactcctacatttcrtactctc

SEQ ID NO: 6948 - DNA, 50 bp, Artificial Sequence
  Description of Artificial Sequence: Synthetic probe
ccctaccatataaatatacaactttaacracactacctctcttaaacttc

SEQ ID NO: 6949 - DNA, 50 bp, Artificial Sequence
  Description of Artificial Sequence: Synthetic probe
cccataaaacccaacacrtaacccaaaacatcrctatacctacacttaac

SEQ ID NO: 6950 - DNA, 50 bp, Artificial Sequence
  Description of Artificial Sequence: Synthetic probe
acaaaaaatacaatcataacacttacctacctcaaaaaatactacraaac

SEQ ID NO: 6951 - DNA, 50 bp, Artificial Sequence
  Description of Artificial Sequence: Synthetic probe
gtttatggaatttagtaygtggtttagggtatygttgtgtttgtatttaa

SEQ ID NO: 6952 - DNA, 50 bp, Artificial Sequence
  Description of Artificial Sequence: Synthetic probe
cctaattaacaatcactcctaatatctcaaatattctctactcaacccac

SEQ ID NO: 6953 - DNA, 50 bp, Artificial Sequence
  Description of Artificial Sequence: Synthetic probe
tgtttagatagatttttagtagttaggtyggattatttggggttttggaa

SEQ ID NO: 6954 - DNA, 50 bp, Artificial Sequence
  Description of Artificial Sequence: Synthetic probe
atccaaataaacttccaacaaccaaatcraactatctaaaattctaaaac

SEQ ID NO: 6955 - DNA, 50 bp, Artificial Sequence
  Description of Artificial Sequence: Synthetic probe
acttttaaaaataaacrttatctaataaacaaacraccrctttcratttc

SEQ ID NO: 6956 - DNA, 50 bp, Artificial Sequence
  Description of Artificial Sequence: Synthetic probe
catctaaacataaaacccaaaaacctaaacttctaacccttacatcaaac

SEQ ID NO: 6957 - DNA, 50 bp, Artificial Sequence
  Description of Artificial Sequence: Synthetic probe
ctcctaataactaaaaaacatctcaaactaaaaaaacacctctaatcccc

SEQ ID NO: 6958 - DNA, 50 bp, Artificial Sequence
  Description of Artificial Sequence: Synthetic probe
tttcaataacctaaatcrctacaaataaaaaaacrccccrctaaccracc

SEQ ID NO: 6959 - DNA, 50 bp, Artificial Sequence
  Description of Artificial Sequence: Synthetic probe
ataaaacaaaatataatttaaattctataatcctcaccccracctcatac

SEQ ID NO: 6960 - DNA, 50 bp, Artificial Sequence
  Description of Artificial Sequence: Synthetic probe
atttagtttaagtttttataggttagttatagggttgtaaggattttyga

SEQ ID NO: 6961 - DNA, 50 bp, Artificial Sequence
  Description of Artificial Sequence: Synthetic probe
aaaaactaaaaacaactttctcacattatacacrcaaatctcctataaac

SEQ ID NO: 6962 - DNA, 50 bp, Artificial Sequence
  Description of Artificial Sequence: Synthetic probe
acatttaacratttaaaaattcccatcacrctttaaaaaaatataccrac

SEQ ID NO: 6963 - DNA, 50 bp, Artificial Sequence
  Description of Artificial Sequence: Synthetic probe
acaattaaaataaaataactttccttaaaacaacctaactaaataaaatc

SEQ ID NO: 6964 - DNA, 50 bp, Artificial Sequence
  Description of Artificial Sequence: Synthetic probe
tttaacctcctcatcttaactttaaaaataaaaacaatctcccctactac

SEQ ID NO: 6965 - DNA, 50 bp, Artificial Sequence
  Description of Artificial Sequence: Synthetic probe
cccatcttaaaaaacaactataacttcaaaatacctattcrtttattaac

SEQ ID NO: 6966 - DNA, 50 bp, Artificial Sequence
  Description of Artificial Sequence: Synthetic probe
taacctacaactcaaaaatatatcaattataaaaaataaactccraaccc

SEQ ID NO: 6967 - DNA, 50 bp, Artificial Sequence
  Description of Artificial Sequence: Synthetic probe
aactaccactactaaaaacccaacccaccaaaaacaactatttttttaac

SEQ ID NO: 6968 - DNA, 50 bp, Artificial Sequence
  Description of Artificial Sequence: Synthetic probe
tttctaattaattcacaaattttcccraattaccrcaataaaaaaaaacc

SEQ ID NO: 6969 - DNA, 50 bp, Artificial Sequence
  Description of Artificial Sequence: Synthetic probe
acraaacctaaccrcttaccaccrttcttctaataaaataaaactaatac

SEQ ID NO: 6970 - DNA, 50 bp, Artificial Sequence
  Description of Artificial Sequence: Synthetic probe
cccrataaaaacrcaaaactcaaaaaaccrcctccraaaaaaaatctaac

SEQ ID NO: 6971 - DNA, 50 bp, Artificial Sequence
  Description of Artificial Sequence: Synthetic probe
taaaaaataactaccratttacacatacraatattaaatctctaataaac

SEQ ID NO: 6972 - DNA, 50 bp, Artificial Sequence
  Description of Artificial Sequence: Synthetic probe
aaaaaataactaccaatttacacatacaaatattaaatctctaataaaca

SEQ ID NO: 6973 - DNA, 50 bp, Artificial Sequence
  Description of Artificial Sequence: Synthetic probe
ttaatcaaaaaattcaactcaatcacttactctccattatcatcatactc

SEQ ID NO: 6974 - DNA, 50 bp, Artificial Sequence
  Description of Artificial Sequence: Synthetic probe
tgagggataattattgatttgtatatatgaatgttgagtttttggtgaat

SEQ ID NO: 6975 - DNA, 50 bp, Artificial Sequence
  Description of Artificial Sequence: Synthetic probe
aactaaaaacaatactactacttctcrccractaaatactactccraacc

SEQ ID NO: 6976 - DNA, 50 bp, Artificial Sequence
  Description of Artificial Sequence: Synthetic probe
cctaaacaatatcacratcacaaaaaattctcrctccactacacatctcc

SEQ ID NO: 6977 - DNA, 50 bp, Artificial Sequence
  Description of Artificial Sequence: Synthetic probe
tacraactatcraaaaacccatacaccacrataaccracttataaaacrc

SEQ ID NO: 6978 - DNA, 50 bp, Artificial Sequence
  Description of Artificial Sequence: Synthetic probe
rtaataactctaaacaaacctcaattatctcrtccaaaacaataaacaac

SEQ ID NO: 6979 - DNA, 50 bp, Artificial Sequence
  Description of Artificial Sequence: Synthetic probe
ttacaacctattaaatcttcccaaatccacccttataattttcctaaatc

SEQ ID NO: 6980 - DNA, 50 bp, Artificial Sequence
  Description of Artificial Sequence: Synthetic probe
ctacaaaaaaactcccccaaatctaataacccaaaactactactacaacc

SEQ ID NO: 6981 - DNA, 50 bp, Artificial Sequence
  Description of Artificial Sequence: Synthetic probe
actacacatataacccataaaataacataaaaaaataacttcccataccc

SEQ ID NO: 6982 - DNA, 50 bp, Artificial Sequence
  Description of Artificial Sequence: Synthetic probe
aacracaccattataactacaaataaaacttaaaccrcrcraaaaaactc

SEQ ID NO: 6983 - DNA, 50 bp, Artificial Sequence
  Description of Artificial Sequence: Synthetic probe
attataactacaaataaaacttaaaccrcrcraaaaaactcrcrcacctc

SEQ ID NO: 6984 - DNA, 50 bp, Artificial Sequence
  Description of Artificial Sequence: Synthetic probe
aatcctcaaaaaacctaaaaaaatcctacrccacraattcttcctcraac

SEQ ID NO: 6985 - DNA, 50 bp, Artificial Sequence
  Description of Artificial Sequence: Synthetic probe
ccctaatcctcaaaaaacctaaaaaaatcctacrccacraattcttcctc

SEQ ID NO: 6986 - DNA, 50 bp, Artificial Sequence
  Description of Artificial Sequence: Synthetic probe
aataaaacraaaaacrcccctaatcctcaaaaaacctaaaaaaatcctac

SEQ ID NO: 6987 - DNA, 50 bp, Artificial Sequence
  Description of Artificial Sequence: Synthetic probe
craaccraaacaaaaactcaataaaacccrcccraaaaaaaacccrtaac

SEQ ID NO: 6988 - DNA, 50 bp, Artificial Sequence
  Description of Artificial Sequence: Synthetic probe
raaaaaaaaaactacraatcactaaccatccaaaaacrcatatttccccc

SEQ ID NO: 6989 - DNA, 50 bp, Artificial Sequence
  Description of Artificial Sequence: Synthetic probe
aaaaataaccraaacraaaaaaatatacrtctctaaataaccaataactc

SEQ ID NO: 6990 - DNA, 50 bp, Artificial Sequence
  Description of Artificial Sequence: Synthetic probe
raaaaaaatatacrtctctaaataaccaataactcrcaacccccttcccc

SEQ ID NO: 6991 - DNA, 50 bp, Artificial Sequence
  Description of Artificial Sequence: Synthetic probe
accttaaacracrcracttaatactcraaaacttaaaaatacccaacctc

SEQ ID NO: 6992 - DNA, 50 bp, Artificial Sequence
  Description of Artificial Sequence: Synthetic probe
ttaaacracrcracttaatactcraaaacttaaaaatacccaacctcrac

SEQ ID NO: 6993 - DNA, 50 bp, Artificial Sequence
  Description of Artificial Sequence: Synthetic probe
tttgtttggttatygtttgtgygtgtgattttaagattygatatttatta

SEQ ID NO: 6994 - DNA, 50 bp, Artificial Sequence
  Description of Artificial Sequence: Synthetic probe
ataaacraatatttacttaaccaccrcctatacrtataaccccaaaactc

SEQ ID NO: 6995 - DNA, 50 bp, Artificial Sequence
  Description of Artificial Sequence: Synthetic probe
tcraacccaaactcatacactaaatataaacraatatttacttaaccacc

SEQ ID NO: 6996 - DNA, 50 bp, Artificial Sequence
  Description of Artificial Sequence: Synthetic probe
acccaacctcracrtaataaatatcraatcttaaaatcacacrcacaaac

SEQ ID NO: 6997 - DNA, 50 bp, Artificial Sequence
  Description of Artificial Sequence: Synthetic probe
ttygaatttaggtttatgtattaaatatgagygggtgtttgtttggttat

SEQ ID NO: 6998 - DNA, 50 bp, Artificial Sequence
  Description of Artificial Sequence: Synthetic probe
aatatcraatcttaaaatcacacrcacaaacrataaccaaacaaacaccc

SEQ ID NO: 6999 - DNA, 50 bp, Artificial Sequence
  Description of Artificial Sequence: Synthetic probe
ttaagtaaatattygtttatatttagtgtatgagtttgggttygagttgt

SEQ ID NO: 7000 - DNA, 50 bp, Artificial Sequence
  Description of Artificial Sequence: Synthetic probe
caaacaaacacccrctcatatttaatacataaacctaaattcraattacc

SEQ ID NO: 7001 - DNA, 50 bp, Artificial Sequence
  Description of Artificial Sequence: Synthetic probe
cacccrctcatatttaatacataaacctaaattcraattaccraaacctc

SEQ ID NO: 7002 - DNA, 50 bp, Artificial Sequence
  Description of Artificial Sequence: Synthetic probe
cccrctcatatttaatacataaacctaaattcraattaccraaacctcrc

SEQ ID NO: 7003 - DNA, 50 bp, Artificial Sequence
  Description of Artificial Sequence: Synthetic probe
crctcatatttaatacataaacctaaattcraattaccraaacctcrcrc

SEQ ID NO: 7004 - DNA, 50 bp, Artificial Sequence
  Description of Artificial Sequence: Synthetic probe
cataaacctaaattcraattaccraaacctcrcrcrtaaaacaaaaattc

SEQ ID NO: 7005 - DNA, 50 bp, Artificial Sequence
  Description of Artificial Sequence: Synthetic probe
aacctaaattcraattaccraaacctcrcrcrtaaaacaaaaattcraac

SEQ ID NO: 7006 - DNA, 50 bp, Artificial Sequence
  Description of Artificial Sequence: Synthetic probe
ctacrcctaaaaactactacctcaatttcccaacracaaacaaaaatttc

SEQ ID NO: 7007 - DNA, 50 bp, Artificial Sequence
  Description of Artificial Sequence: Synthetic probe
rcctaaaaactactacctcaatttcccaacracaaacaaaaatttcraac

SEQ ID NO: 7008 - DNA, 50 bp, Artificial Sequence
  Description of Artificial Sequence: Synthetic probe
aacrtcccaaactccrcraaaaaactaaaacaactaacttaaatcttaac

SEQ ID NO: 7009 - DNA, 50 bp, Artificial Sequence
  Description of Artificial Sequence: Synthetic probe
ctcrtcaaaatccaaactaactacctcaatttccccrcraaacctaaaac

SEQ ID NO: 7010 - DNA, 50 bp, Artificial Sequence
  Description of Artificial Sequence: Synthetic probe
aaatcacrcaacttccttcctttttctaaaaactataaaaacrcctccrc

SEQ ID NO: 7011 - DNA, 50 bp, Artificial Sequence
  Description of Artificial Sequence: Synthetic probe
ctctactctaaccrcttctcraaaaatacccrtatcaactaaatataaac

SEQ ID NO: 7012 - DNA, 50 bp, Artificial Sequence
  Description of Artificial Sequence: Synthetic probe
aatcraataaataaaccccctacctaaataaaaacccaaaaatcctcccc

SEQ ID NO: 7013 - DNA, 50 bp, Artificial Sequence
  Description of Artificial Sequence: Synthetic probe
ctccraaaaaattaacaatatttaaaaatacttaataaaccrcttaacrc

SEQ ID NO: 7014 - DNA, 50 bp, Artificial Sequence
  Description of Artificial Sequence: Synthetic probe
agttggtagtatttaaaagtatttaataaatygtttagygyggtgtagat

SEQ ID NO: 7015 - DNA, 50 bp, Artificial Sequence
  Description of Artificial Sequence: Synthetic probe
attaacaatatttaaaaatacttaataaaccrcttaacrcratataaacc

SEQ ID NO: 7016 - DNA, 50 bp, Artificial Sequence
  Description of Artificial Sequence: Synthetic probe
taataaaccrcttaacrcratataaaccrtaattcaaacttaacctaacc

SEQ ID NO: 7017 - DNA, 50 bp, Artificial Sequence
  Description of Artificial Sequence: Synthetic probe
ccrcttaacrcratataaaccrtaattcaaacttaacctaaccraaaaac

SEQ ID NO: 7018 - DNA, 50 bp, Artificial Sequence
  Description of Artificial Sequence: Synthetic probe
attatttccraactaacaaaatacccraaccraaaaaatcatcctccctc

SEQ ID NO: 7019 - DNA, 50 bp, Artificial Sequence
  Description of Artificial Sequence: Synthetic probe
ctccraaacaaatactacaattatttccraactaacaaaatacccraacc

SEQ ID NO: 7020 - DNA, 50 bp, Artificial Sequence
  Description of Artificial Sequence: Synthetic probe
ttcccctccraaacaaatactacaattatttccraactaacaaaataccc

SEQ ID NO: 7021 - DNA, 50 bp, Artificial Sequence
  Description of Artificial Sequence: Synthetic probe
tcctttataacrctaaccacctaaaaaccaaaaaacratactactttccc

SEQ ID NO: 7022 - DNA, 50 bp, Artificial Sequence
  Description of Artificial Sequence: Synthetic probe
actaaaacrcrtaatcctttataacrctaaccacctaaaaaccaaaaaac

SEQ ID NO: 7023 - DNA, 50 bp, Artificial Sequence
  Description of Artificial Sequence: Synthetic probe
aaaattacaaatataaaccaccataccccaaccttactttcttaaaatac

SEQ ID NO: 7024 - DNA, 50 bp, Artificial Sequence
  Description of Artificial Sequence: Synthetic probe
ggttaaataaatttagtagtttagtgtattagattgggtaaatagtggtt

SEQ ID NO: 7025 - DNA, 50 bp, Artificial Sequence
  Description of Artificial Sequence: Synthetic probe
atcaaataaattcaacaacccaatacactaaactaaacaaacaataactc

SEQ ID NO: 7026 - DNA, 50 bp, Artificial Sequence
  Description of Artificial Sequence: Synthetic probe
aaaaacaaaaacaaacaaatcacaaaatcaaaaaatcaaaaccatcctca

SEQ ID NO: 7027 - DNA, 50 bp, Artificial Sequence
  Description of Artificial Sequence: Synthetic probe
aaacctaacaacaaaaacrcctcaattaataaaaaaaatcraatcacctc

SEQ ID NO: 7028 - DNA, 50 bp, Artificial Sequence
  Description of Artificial Sequence: Synthetic probe
tygtgtaaggtatattttggtattyggaagaggtttagtatagttgtttt

SEQ ID NO: 7029 - DNA, 50 bp, Artificial Sequence
  Description of Artificial Sequence: Synthetic probe
crtacaaaatacatcttaacacccraaaaaaacccaatacaattaccccc

SEQ ID NO: 7030 - DNA, 50 bp, Artificial Sequence
  Description of Artificial Sequence: Synthetic probe
aaaaacaaataacratccctacraaccttatcctaattaactaaacacrc

SEQ ID NO: 7031 - DNA, 50 bp, Artificial Sequence
  Description of Artificial Sequence: Synthetic probe
actaaaaattttccaaactctaaacaaataaaccctaaacctaaaaacrc

SEQ ID NO: 7032 - DNA, 50 bp, Artificial Sequence
  Description of Artificial Sequence: Synthetic probe
ctaaactaaaatcraaaaataaatcctacccatctccctaacatcttatc

SEQ ID NO: 7033 - DNA, 50 bp, Artificial Sequence
  Description of Artificial Sequence: Synthetic probe
aaatcrctatctataatctcccacaaacracctaacttttacaattaaac

SEQ ID NO: 7034 - DNA, 50 bp, Artificial Sequence
  Description of Artificial Sequence: Synthetic probe
cctctcaaccrataaataaaaaaaatcrctatctataatctcccacaaac

SEQ ID NO: 7035 - DNA, 50 bp, Artificial Sequence
  Description of Artificial Sequence: Synthetic probe
aaaccaaaccrtttataaaaaaccacaaacaacracccccttcatttacc

SEQ ID NO: 7036 - DNA, 50 bp, Artificial Sequence
  Description of Artificial Sequence: Synthetic probe
tcacatcrttaaaccttcctcccctcttatcccaaaacaactttaaaaac

SEQ ID NO: 7037 - DNA, 50 bp, Artificial Sequence
  Description of Artificial Sequence: Synthetic probe
acaaaaaaaacraccctaaccaaatactacccaacaaaaatacttttaac

SEQ ID NO: 7038 - DNA, 50 bp, Artificial Sequence
  Description of Artificial Sequence: Synthetic probe
actttaaaaacrttaaaaacatttctactaaataacatctaaccaaaatc

SEQ ID NO: 7039 - DNA, 50 bp, Artificial Sequence
  Description of Artificial Sequence: Synthetic probe
agttttaaaaaygttaaaagtatttttgttgggtagtatttggttagggt

SEQ ID NO: 7040 - DNA, 50 bp, Artificial Sequence
  Description of Artificial Sequence: Synthetic probe
ccttctacccctaaaaccctaacaacctatcraactactactatataacc

SEQ ID NO: 7041 - DNA, 50 bp, Artificial Sequence
  Description of Artificial Sequence: Synthetic probe
tatctactcaaaaacrtctatcacttcaaaaaacttaaataacttacccc

SEQ ID NO: 7042 - DNA, 50 bp, Artificial Sequence
  Description of Artificial Sequence: Synthetic probe
tgttattttagagagtttaagtgatttgtttyggttatatagtagtagtt

SEQ ID NO: 7043 - DNA, 50 bp, Artificial Sequence
  Description of Artificial Sequence: Synthetic probe
atcacttcaaaaaacttaaataacttaccccratcacacaacaacaatcc

SEQ ID NO: 7044 - DNA, 50 bp, Artificial Sequence
  Description of Artificial Sequence: Synthetic probe
tcacraattaaaacccttaaaacttcrctacaccccratactacaatcac

SEQ ID NO: 7045 - DNA, 50 bp, Artificial Sequence
  Description of Artificial Sequence: Synthetic probe
aaataaaaaaaaactcacraattaaaacccttaaaacttcrctacacccc

SEQ ID NO: 7046 - DNA, 50 bp, Artificial Sequence
  Description of Artificial Sequence: Synthetic probe
rttacccatctaaacrtttaaaaaaaccrcraaaacrcaactatctccac

SEQ ID NO: 7047 - DNA, 50 bp, Artificial Sequence
  Description of Artificial Sequence: Synthetic probe
aaaaaactaaaaacaaaatcccratcccrcrtaaaaacaactacrctccc

SEQ ID NO: 7048 - DNA, 50 bp, Artificial Sequence
  Description of Artificial Sequence: Synthetic probe
rtaaaaacaactacrctcccrcratttctttaaacrcccaaataaacaac

SEQ ID NO: 7049 - DNA, 50 bp, Artificial Sequence
  Description of Artificial Sequence: Synthetic probe
aaaacraaattaaattcaaatctaatcacataacctaacctaaaatactc

SEQ ID NO: 7050 - DNA, 50 bp, Artificial Sequence
  Description of Artificial Sequence: Synthetic probe
ctattaacctcaccaccraccaataataatcraccacrcrtaaaaaaaac

SEQ ID NO: 7051 - DNA, 50 bp, Artificial Sequence
  Description of Artificial Sequence: Synthetic probe
aaataaccratttctattaacctcaccaccraccaataataatcraccac

SEQ ID NO: 7052 - DNA, 50 bp, Artificial Sequence
  Description of Artificial Sequence: Synthetic probe
tagatggtygatttttattggttttattatygattaatgatggtygatta

SEQ ID NO: 7053 - DNA, 50 bp, Artificial Sequence
  Description of Artificial Sequence: Synthetic probe
ccccacrcrtaatcraccatcattaatcrataataaaaccaataaaaatc

SEQ ID NO: 7054 - DNA, 50 bp, Artificial Sequence
  Description of Artificial Sequence: Synthetic probe
crattcactatattaaactacrcctcraaacrctaaattcccaaataacc

SEQ ID NO: 7055 - DNA, 50 bp, Artificial Sequence
  Description of Artificial Sequence: Synthetic probe
crtctttttccattaaaccttcrtcrattcactatattaaactacrcctc

SEQ ID NO: 7056 - DNA, 50 bp, Artificial Sequence
  Description of Artificial Sequence: Synthetic probe
aatcrataataaaaccaataaaaatcraccatctaaaaacccaacrttcc

SEQ ID NO: 7057 - DNA, 50 bp, Artificial Sequence
  Description of Artificial Sequence: Synthetic probe
aaatataaaaatacaaaacraacracracrtccrtccrtactacaaaacc

SEQ ID NO: 7058 - DNA, 50 bp, Artificial Sequence
  Description of Artificial Sequence: Synthetic probe
ctaaaaccrcraacratttctcttctacrtccctaaaaaacrcraaaaac

SEQ ID NO: 7059 - DNA, 50 bp, Artificial Sequence
  Description of Artificial Sequence: Synthetic probe
tcccrcracraaaattaaaattaacccraaaatctctaaaaacacccrac

SEQ ID NO: 7060 - DNA, 50 bp, Artificial Sequence
  Description of Artificial Sequence: Synthetic probe
taaaaaatatcraaaatctcctttcctatccccaacaacttataactctc

SEQ ID NO: 7061 - DNA, 50 bp, Artificial Sequence
  Description of Artificial Sequence: Synthetic probe
actaaaaacraatttaccaaaatctaacttatatttaaattcratccaac

SEQ ID NO: 7062 - DNA, 50 bp, Artificial Sequence
  Description of Artificial Sequence: Synthetic probe
aattgagaaygaatttgttaaaatttgatttgtgtttggattygatttag

SEQ ID NO: 7063 - DNA, 50 bp, Artificial Sequence
  Description of Artificial Sequence: Synthetic probe
aaacttcccrctaaatcraatccaaacacaaatcaaattttaacaaattc

SEQ ID NO: 7064 - DNA, 50 bp, Artificial Sequence
  Description of Artificial Sequence: Synthetic probe
ttacctttatctttctcctcrtcaccrtaaaacttaccraaactaaaaac

SEQ ID NO: 7065 - DNA, 50 bp, Artificial Sequence
  Description of Artificial Sequence: Synthetic probe
aaatcraatccaaacacaaatcaaattttaacaaattcrttctcaattcc

SEQ ID NO: 7066 - DNA, 50 bp, Artificial Sequence
  Description of Artificial Sequence: Synthetic probe
aacacaaatcaaattttaacaaattcrttctcaattccracaaattctac

SEQ ID NO: 7067 - DNA, 50 bp, Artificial Sequence
  Description of Artificial Sequence: Synthetic probe
aaatccraaaaaacttcctaacaaaaatccttatctatacacacacaacc

SEQ ID NO: 7068 - DNA, 50 bp, Artificial Sequence
  Description of Artificial Sequence: Synthetic probe
aacraaacrataataaaatcaccrttaaaccttaactcrcraaaaccctc

SEQ ID NO: 7069 - DNA, 50 bp, Artificial Sequence
  Description of Artificial Sequence: Synthetic probe
acaaacctaaaacraaacrataataaaatcaccrttaaaccttaactcrc

SEQ ID NO: 7070 - DNA, 50 bp, Artificial Sequence
  Description of Artificial Sequence: Synthetic probe
ctacaaacctaaaacraaacrataataaaatcaccrttaaaccttaactc

SEQ ID NO: 7071 - DNA, 50 bp, Artificial Sequence
  Description of Artificial Sequence: Synthetic probe
aaatcttctctattctctaaatcraaaatcctcrcraatcaaaacccaac

SEQ ID NO: 7072 - DNA, 50 bp, Artificial Sequence
  Description of Artificial Sequence: Synthetic probe
tacatcctaacttatctacaaacctaaaacraaacrataataaaatcacc

SEQ ID NO: 7073 - DNA, 50 bp, Artificial Sequence
  Description of Artificial Sequence: Synthetic probe
atagagtataaaagygtgtattttggtttgtttgtaaatttgagayggga

SEQ ID NO: 7074 - DNA, 50 bp, Artificial Sequence
  Description of Artificial Sequence: Synthetic probe
accracaaaacataaaaacrtacatcctaacttatctacaaacctaaaac

SEQ ID NO: 7075 - DNA, 50 bp, Artificial Sequence
  Description of Artificial Sequence: Synthetic probe
ggtygatagagtataaaagygtgtattttggtttgtttgtaaatttgaga

SEQ ID NO: 7076 - DNA, 50 bp, Artificial Sequence
  Description of Artificial Sequence: Synthetic probe
ataacctcactaccrtcccrtctcaaatttacaaacaaaccaaaatacac

SEQ ID NO: 7077 - DNA, 50 bp, Artificial Sequence
  Description of Artificial Sequence: Synthetic probe
ggtgattttattatygtttygttttaggtttgtagataagttaggatgta

SEQ ID NO: 7078 - DNA, 50 bp, Artificial Sequence
  Description of Artificial Sequence: Synthetic probe
aattgtattattagygtttggtttttgttgttgaaaggttygaaattggt

SEQ ID NO: 7079 - DNA, 50 bp, Artificial Sequence
  Description of Artificial Sequence: Synthetic probe
actacaccaccaacrtctaacctttattactaaaaaactcraaactaacc

SEQ ID NO: 7080 - DNA, 50 bp, Artificial Sequence
  Description of Artificial Sequence: Synthetic probe
tttygttttaggtttgtagataagttaggatgtaygtttttatgttttgt

SEQ ID NO: 7081 - DNA, 50 bp, Artificial Sequence
  Description of Artificial Sequence: Synthetic probe
atttacaaacaaaccaaaatacacrcttttatactctatcraccaatttc

SEQ ID NO: 7082 - DNA, 50 bp, Artificial Sequence
  Description of Artificial Sequence: Synthetic probe
ttttatygtgaattgtattattagygtttggtttttgttgttgaaaggtt

SEQ ID NO: 7083 - DNA, 50 bp, Artificial Sequence
  Description of Artificial Sequence: Synthetic probe
ttcaccrtaaactacaccaccaacrtctaacctttattactaaaaaactc

SEQ ID NO: 7084 - DNA, 50 bp, Artificial Sequence
  Description of Artificial Sequence: Synthetic probe
ttttatactctatcraccaatttcraacctttcaacaacaaaaaccaaac

SEQ ID NO: 7085 - DNA, 50 bp, Artificial Sequence
  Description of Artificial Sequence: Synthetic probe
ccccacaatcratattctactcatatttcaccrtaaactacaccaccaac

SEQ ID NO: 7086 - DNA, 50 bp, Artificial Sequence
  Description of Artificial Sequence: Synthetic probe
tttttatgttttgtyggttagtttygagttttttagtaataaaggttaga

SEQ ID NO: 7087 - DNA, 50 bp, Artificial Sequence
  Description of Artificial Sequence: Synthetic probe
atctaatccaaactattaaaaaacaacttcacataaccrcccccacaatc

SEQ ID NO: 7088 - DNA, 50 bp, Artificial Sequence
  Description of Artificial Sequence: Synthetic probe
ccrtacatatctatctaatccaaactattaaaaaacaacttcacataacc

SEQ ID NO: 7089 - DNA, 50 bp, Artificial Sequence
  Description of Artificial Sequence: Synthetic probe
taataatacaattcacrataaaacataaacaaaacatcractataaaaac

SEQ ID NO: 7090 - DNA, 50 bp, Artificial Sequence
  Description of Artificial Sequence: Synthetic probe
acractatataaaactatttcctaataatttaaaccaaacaaacatacac

SEQ ID NO: 7091 - DNA, 50 bp, Artificial Sequence
  Description of Artificial Sequence: Synthetic probe
ggyggttatgtgaagttgttttttaatagtttggattagatagatatgta

SEQ ID NO: 7092 - DNA, 50 bp, Artificial Sequence
  Description of Artificial Sequence: Synthetic probe
aacaatttattacattataatcrcaaatctaaactattaatttaatttac

SEQ ID NO: 7093 - DNA, 50 bp, Artificial Sequence
  Description of Artificial Sequence: Synthetic probe
ttcaaaacaaaatcaaaatctaaatttctcttctcaaccttaacaaaccc

SEQ ID NO: 7094 - DNA, 50 bp, Artificial Sequence
  Description of Artificial Sequence: Synthetic probe
cctaaatataaaacaaatccaattaaaaatcaaaaactacccatcatctc

SEQ ID NO: 7095 - DNA, 50 bp, Artificial Sequence
  Description of Artificial Sequence: Synthetic probe
atttaggtgtgaagtagatttagttaagagttagagattatttattattt

SEQ ID NO: 7096 - DNA, 50 bp, Artificial Sequence
  Description of Artificial Sequence: Synthetic probe
ttataattaaaaataacataaaccttcttaataccaaaaccacaaatatc

SEQ ID NO: 7097 - DNA, 50 bp, Artificial Sequence
  Description of Artificial Sequence: Synthetic probe
taataaataatctctaactcttaactaaatctacttcacacctaaatccc

SEQ ID NO: 7098 - DNA, 50 bp, Artificial Sequence
  Description of Artificial Sequence: Synthetic probe
taactatcataaaaaaattcaaaaatcaacctcattaaaaaataaccccc

SEQ ID NO: 7099 - DNA, 50 bp, Artificial Sequence
  Description of Artificial Sequence: Synthetic probe
tttaaaacatcaaaatcctttatcttcttaaataacaaaaaatcccaatc

SEQ ID NO: 7100 - DNA, 50 bp, Artificial Sequence
  Description of Artificial Sequence: Synthetic probe
ataaaataaaaattaacaacaaccaaataaaatccractccttaaaaaac

SEQ ID NO: 7101 - DNA, 50 bp, Artificial Sequence
  Description of Artificial Sequence: Synthetic probe
aatcatccttcttccttaataattaaaactacaaatatacataacatctc

SEQ ID NO: 7102 - DNA, 50 bp, Artificial Sequence
  Description of Artificial Sequence: Synthetic probe
caaataaaataaatcacrcctataatcctcrcccaaaaaccaaaataaac

SEQ ID NO: 7103 - DNA, 50 bp, Artificial Sequence
  Description of Artificial Sequence: Synthetic probe
acrtaatccacctcacctaacctctccatctttttaactacaatatcaac

SEQ ID NO: 7104 - DNA, 50 bp, Artificial Sequence
  Description of Artificial Sequence: Synthetic probe
taataattataaaaacacaaataaaaaccctatccaaaacaaaaactatc

SEQ ID NO: 7105 - DNA, 50 bp, Artificial Sequence
  Description of Artificial Sequence: Synthetic probe
atagtggttataggaatataggtggaaattttgtttaaagtaagggttat

SEQ ID NO: 7106 - DNA, 50 bp, Artificial Sequence
  Description of Artificial Sequence: Synthetic probe
tcctccaaatcaaatctaacaccatctttaacaacttcctcatcaccaac

SEQ ID NO: 7107 - DNA, 50 bp, Artificial Sequence
  Description of Artificial Sequence: Synthetic probe
aatctaacaccatctttaacaacttcctcatcaccaacrataaaacatac

SEQ ID NO: 7108 - DNA, 50 bp, Artificial Sequence
  Description of Artificial Sequence: Synthetic probe
acaacttcctcatcaccaacrataaaacatacrctaaaaaatttaacaac

SEQ ID NO: 7109 - DNA, 50 bp, Artificial Sequence
  Description of Artificial Sequence: Synthetic probe
crtaaaacrtaacaaaaataaaacctaatcctaatcctaatatcraaaac

SEQ ID NO: 7110 - DNA, 50 bp, Artificial Sequence
  Description of Artificial Sequence: Synthetic probe
tatatatttctatactatacacctattcctaaaaaaataataaaattctc

SEQ ID NO: 7111 - DNA, 50 bp, Artificial Sequence
  Description of Artificial Sequence: Synthetic probe
aaaatttaggtgttaggaggtttgtatataaaaatgtggattttatgata

SEQ ID NO: 7112 - DNA, 50 bp, Artificial Sequence
  Description of Artificial Sequence: Synthetic probe
aaacccaaatattaaaaaatttacatacaaaaatataaaccccataacac

SEQ ID NO: 7113 - DNA, 50 bp, Artificial Sequence
  Description of Artificial Sequence: Synthetic probe
gtatatgtttttgtattatatatttgtttttgagggagtgatagggtttt

SEQ ID NO: 7114 - DNA, 50 bp, Artificial Sequence
  Description of Artificial Sequence: Synthetic probe
tcactcctatatcaaaaattataaaaaacrcraaccaaaactttactatc

SEQ ID NO: 7115 - DNA, 50 bp, Artificial Sequence
  Description of Artificial Sequence: Synthetic probe
actcaaataatccrccrctaaatcaaaaacaattatacaataacracaac

SEQ ID NO: 7116 - DNA, 50 bp, Artificial Sequence
  Description of Artificial Sequence: Synthetic probe
tctataacacctaccccaactaatccrctaaaacracaaatctcttaaac

SEQ ID NO: 7117 - DNA, 50 bp, Artificial Sequence
  Description of Artificial Sequence: Synthetic probe
aatttactatatccrataaacttcccaataaaaatatccaataaacaaac

SEQ ID NO: 7118 - DNA, 50 bp, Artificial Sequence
  Description of Artificial Sequence: Synthetic probe
aatactttcctctaacccraatctaccataaactctctatataaatatcc

SEQ ID NO: 7119 - DNA, 50 bp, Artificial Sequence
  Description of Artificial Sequence: Synthetic probe
ctttaaaaatactctaatccttcctcatatttaaccttaaaatacacctc

SEQ ID NO: 7120 - DNA, 50 bp, Artificial Sequence
  Description of Artificial Sequence: Synthetic probe
ttcrcataaccattccracaacctataaatactatcaaactaaatctacc

SEQ ID NO: 7121 - DNA, 50 bp, Artificial Sequence
  Description of Artificial Sequence: Synthetic probe
tactaattaaacacttaactttccctataattaccaatcccacrcaaacc

SEQ ID NO: 7122 - DNA, 50 bp, Artificial Sequence
  Description of Artificial Sequence: Synthetic probe
taaccattaatctacactatcttttctacccataacccaatcaatctcrc

SEQ ID NO: 7123 - DNA, 50 bp, Artificial Sequence
  Description of Artificial Sequence: Synthetic probe
tataacaaattacaaatacaaacttatctcaaaaacttatcacctacctc

SEQ ID NO: 7124 - DNA, 50 bp, Artificial Sequence
  Description of Artificial Sequence: Synthetic probe
attacataaaatctacaaatactatttcttccttctctctataaataatc

SEQ ID NO: 7125 - DNA, 50 bp, Artificial Sequence
  Description of Artificial Sequence: Synthetic probe
tagaaagttagtattaaagatttgataatatagagttagtgatgttgtta

SEQ ID NO: 7126 - DNA, 50 bp, Artificial Sequence
  Description of Artificial Sequence: Synthetic probe
atactaacactaattaaaaactctaaaaacccctccatacaaatacrccc

SEQ ID NO: 7127 - DNA, 50 bp, Artificial Sequence
  Description of Artificial Sequence: Synthetic probe
caaaaaacccatacctaaacaaaatcctattccctacatcttttatattc

SEQ ID NO: 7128 - DNA, 50 bp, Artificial Sequence
  Description of Artificial Sequence: Synthetic probe
aaaaaacccatacctaaacaaaatcctattccctacatcttttatattca

SEQ ID NO: 7129 - DNA, 50 bp, Artificial Sequence
  Description of Artificial Sequence: Synthetic probe
ataaggttagggaaagttgtggtttagaattgatgtttttttagaggata

SEQ ID NO: 7130 - DNA, 50 bp, Artificial Sequence
  Description of Artificial Sequence: Synthetic probe
taaggttagggaaagttgtggtttagaattgatgtttttttagaggatat

SEQ ID NO: 7131 - DNA, 50 bp, Artificial Sequence
  Description of Artificial Sequence: Synthetic probe
taaactaaaaacctaaaaaatcatatacctatcattactccaccactcac

SEQ ID NO: 7132 - DNA, 50 bp, Artificial Sequence
  Description of Artificial Sequence: Synthetic probe
tggtaggtatttagattaatagtgattaggaaattttgaagtttgtttaa

SEQ ID NO: 7133 - DNA, 50 bp, Artificial Sequence
  Description of Artificial Sequence: Synthetic probe
aacaaacattcaaaccaataataattaaaaaaccttaaaacctacccaac

SEQ ID NO: 7134 - DNA, 50 bp, Artificial Sequence
  Description of Artificial Sequence: Synthetic probe
acrattaaaactatactctcaactactcraaaccaatccccrcatttaac

SEQ ID NO: 7135 - DNA, 50 bp, Artificial Sequence
  Description of Artificial Sequence: Synthetic probe
aaacctaccccaataaaatctataaattcccraaaataatttcactcccc

SEQ ID NO: 7136 - DNA, 50 bp, Artificial Sequence
  Description of Artificial Sequence: Synthetic probe
cccaaaccatactctcataaatccaaccaaatcrcrctaaaacaatttcc

SEQ ID NO: 7137 - DNA, 50 bp, Artificial Sequence
  Description of Artificial Sequence: Synthetic probe
rctaatcctaacctaaatccaacraaaacrcacrctactaaactatcaac

SEQ ID NO: 7138 - DNA, 50 bp, Artificial Sequence
  Description of Artificial Sequence: Synthetic probe
aaccaaaacaaacaactaaaaaacaaaaattataacaaaccaaaatcaca

SEQ ID NO: 7139 - DNA, 50 bp, Artificial Sequence
  Description of Artificial Sequence: Synthetic probe
aaaacctccaaactcataacctccttaaaaacraacccaaaaaaaacacc

SEQ ID NO: 7140 - DNA, 50 bp, Artificial Sequence
  Description of Artificial Sequence: Synthetic probe
aactaataaataaaaaccaaactaaccataccactataccraaaaataac

SEQ ID NO: 7141 - DNA, 50 bp, Artificial Sequence
  Description of Artificial Sequence: Synthetic probe
cataataataaccccraccraacacaacracrtcaaacrcttttaaaaac

SEQ ID NO: 7142 - DNA, 50 bp, Artificial Sequence
  Description of Artificial Sequence: Synthetic probe
aataaaaaaaaatatctttaatctccaaaaaaaaattccccacctatctc

SEQ ID NO: 7143 - DNA, 50 bp, Artificial Sequence
  Description of Artificial Sequence: Synthetic probe
craaccaaaatccrtaatcccaatccctaaaaaaaatttaaaaccrttac

SEQ ID NO: 7144 - DNA, 50 bp, Artificial Sequence
  Description of Artificial Sequence: Synthetic probe
acaaatctacaaatctaatcactaatctcattaccaataacrctatacrc

SEQ ID NO: 7145 - DNA, 50 bp, Artificial Sequence
  Description of Artificial Sequence: Synthetic probe
ttaaatacaaattctactctatcctctacaattcctaactttcctcattc

SEQ ID NO: 7146 - DNA, 50 bp, Artificial Sequence
  Description of Artificial Sequence: Synthetic probe
cccttactcctcccaccttcttacttattcctaaatctcaaacttaatcc

SEQ ID NO: 7147 - DNA, 50 bp, Artificial Sequence
  Description of Artificial Sequence: Synthetic probe
ttaattcttctttaacaaatccttaacaaacttaataaattttccactac

SEQ ID NO: 7148 - DNA, 50 bp, Artificial Sequence
  Description of Artificial Sequence: Synthetic probe
tcctcctacaaccttcataataacatcrccataaaaaataactaaacatc

SEQ ID NO: 7149 - DNA, 50 bp, Artificial Sequence
  Description of Artificial Sequence: Synthetic probe
crtaccaacaatacaccaacacacttaaaataacattcaaactcactacc

SEQ ID NO: 7150 - DNA, 50 bp, Artificial Sequence
  Description of Artificial Sequence: Synthetic probe
ccaaaaattccaaaccaatctcctaaaactctaacaacctactccccrac

SEQ ID NO: 7151 - DNA, 50 bp, Artificial Sequence
  Description of Artificial Sequence: Synthetic probe
crataaataaaccrcrattaatctttaaaaaccccrcccctttcctaaac

SEQ ID NO: 7152 - DNA, 50 bp, Artificial Sequence
  Description of Artificial Sequence: Synthetic probe
taacrtatcaacttcaaaatttatattttatacrttattataaccccaac

SEQ ID NO: 7153 - DNA, 50 bp, Artificial Sequence
  Description of Artificial Sequence: Synthetic probe
ttagygtgttagttttagaatttatgttttgtgygttgttgtaattttaa

SEQ ID NO: 7154 - DNA, 50 bp, Artificial Sequence
  Description of Artificial Sequence: Synthetic probe
ttaaggaaygtttaaagttagygtgttagttttagaatttatgttttgtg

SEQ ID NO: 7155 - DNA, 50 bp, Artificial Sequence
  Description of Artificial Sequence: Synthetic probe
taaaaaacrtttaaaactaacrtatcaacttcaaaatttatattttatac

SEQ ID NO: 7156 - DNA, 50 bp, Artificial Sequence
  Description of Artificial Sequence: Synthetic probe
taatatttcraaaacctccaaaatctcrctacacctcaatttcctcaacc

SEQ ID NO: 7157 - DNA, 50 bp, Artificial Sequence
  Description of Artificial Sequence: Synthetic probe
tttccraaatattattataaataacaaatataaaaccctaccaacctctc

SEQ ID NO: 7158 - DNA, 50 bp, Artificial Sequence
  Description of Artificial Sequence: Synthetic probe
ttgtttagagttattaygttttatttattgagtaagtyggtaaattgagt

SEQ ID NO: 7159 - DNA, 50 bp, Artificial Sequence
  Description of Artificial Sequence: Synthetic probe
agataattgaggtttgtttagagttattaygttttatttattgagtaagt

SEQ ID NO: 7160 - DNA, 50 bp, Artificial Sequence
  Description of Artificial Sequence: Synthetic probe
aaccaaaacraaaaacractcaatttaccracttactcaataaataaaac

SEQ ID NO: 7161 - DNA, 50 bp, Artificial Sequence
  Description of Artificial Sequence: Synthetic probe
ygttgtttattgttttggaygagataattgaggtttgtttagagttatta

SEQ ID NO: 7162 - DNA, 50 bp, Artificial Sequence
  Description of Artificial Sequence: Synthetic probe
ccraccataacacccatctttataatcttccataacactaaaattttcac

SEQ ID NO: 7163 - DNA, 50 bp, Artificial Sequence
  Description of Artificial Sequence: Synthetic probe
ataacrtaaacccrcaaacaaaacttacaataaacraatccaacctaaac

SEQ ID NO: 7164 - DNA, 50 bp, Artificial Sequence
  Description of Artificial Sequence: Synthetic probe
atatgtaattgatatatataaagttttagtatatggaggtattgtgatga

SEQ ID NO: 7165 - DNA, 50 bp, Artificial Sequence
  Description of Artificial Sequence: Synthetic probe
gtaattgatatatataaagttttagtatatggaggtattgtgatgayggg

SEQ ID NO: 7166 - DNA, 50 bp, Artificial Sequence
  Description of Artificial Sequence: Synthetic probe
taactaacacatataaaatctcaatacataaaaatactataataacraac

SEQ ID NO: 7167 - DNA, 50 bp, Artificial Sequence
  Description of Artificial Sequence: Synthetic probe
aaaaayggaaattgaggtttgaaagtgttgagatattatataattggtag

SEQ ID NO: 7168 - DNA, 50 bp, Artificial Sequence
  Description of Artificial Sequence: Synthetic probe
aaaacraaaactaaaacttaaaaatattaaaacatcacacaactaataac

SEQ ID NO: 7169 - DNA, 50 bp, Artificial Sequence
  Description of Artificial Sequence: Synthetic probe
cttccrctaccaattatataatatctcaacactttcaaacctcaatttcc

SEQ ID NO: 7170 - DNA, 50 bp, Artificial Sequence
  Description of Artificial Sequence: Synthetic probe
cctaccaaaaaacatatcaataatattcaacaaaacctcctaaaaaaatc

SEQ ID NO: 7171 - DNA, 50 bp, Artificial Sequence
  Description of Artificial Sequence: Synthetic probe
aaacacaataacaatctaacratacacrtcracctaaaaaaaatcaaccc

SEQ ID NO: 7172 - DNA, 50 bp, Artificial Sequence
  Description of Artificial Sequence: Synthetic probe
aaatcctcrtaaaacracrtcttaaacacaataacaatctaacratacac

SEQ ID NO: 7173 - DNA, 50 bp, Artificial Sequence
  Description of Artificial Sequence: Synthetic probe
tattcaacaaaacctcctaaaaaaatcraactaacttctcccaaaccrac

SEQ ID NO: 7174 - DNA, 50 bp, Artificial Sequence
  Description of Artificial Sequence: Synthetic probe
caaaacctcctaaaaaaatcraactaacttctcccaaaccracrtacacc

SEQ ID NO: 7175 - DNA, 50 bp, Artificial Sequence
  Description of Artificial Sequence: Synthetic probe
aacttctcccaaaccracrtacaccrccaaattaccattatattcaaaac

SEQ ID NO: 7176 - DNA, 50 bp, Artificial Sequence
  Description of Artificial Sequence: Synthetic probe
aaacrttaactatcacraactcracaatctccaaatcctcrtaaaacrac

SEQ ID NO: 7177 - DNA, 50 bp, Artificial Sequence
  Description of Artificial Sequence: Synthetic probe
aaaaaacrttaactatcacraactcracaatctccaaatcctcrtaaaac

SEQ ID NO: 7178 - DNA, 50 bp, Artificial Sequence
  Description of Artificial Sequence: Synthetic probe
crctacaaaaaaacrttaactatcacraactcracaatctccaaatcctc

SEQ ID NO: 7179 - DNA, 50 bp, Artificial Sequence
  Description of Artificial Sequence: Synthetic probe
aaattaccattatattcaaaacrccrccctacraaaacctaaaaattatc

SEQ ID NO: 7180 - DNA, 50 bp, Artificial Sequence
  Description of Artificial Sequence: Synthetic probe
caaaccccatcrataaaccrctacaaaaaaacrttaactatcacraactc

SEQ ID NO: 7181 - DNA, 50 bp, Artificial Sequence
  Description of Artificial Sequence: Synthetic probe
aaaaacaataactcrctacaaaccccatcrataaaccrctacaaaaaaac

SEQ ID NO: 7182 - DNA, 50 bp, Artificial Sequence
  Description of Artificial Sequence: Synthetic probe
craaaacctaaaaattatcraacccrtaacaatcaacrtcttcctacaac

SEQ ID NO: 7183 - DNA, 50 bp, Artificial Sequence
  Description of Artificial Sequence: Synthetic probe
aaacaaatacrtaaaaaacaataactcrctacaaaccccatcrataaacc

SEQ ID NO: 7184 - DNA, 50 bp, Artificial Sequence
  Description of Artificial Sequence: Synthetic probe
atctataaatatatctctcaaatttacccaacctccaaatcacaataaac

SEQ ID NO: 7185 - DNA, 50 bp, Artificial Sequence
  Description of Artificial Sequence: Synthetic probe
agagttttaaagtatgtggtttttaaatggtggatattttgagggtttat

SEQ ID NO: 7186 - DNA, 50 bp, Artificial Sequence
  Description of Artificial Sequence: Synthetic probe
caaaatactcaacctaacctaactcctacctacatcacttatttcttaac

SEQ ID NO: 7187 - DNA, 50 bp, Artificial Sequence
  Description of Artificial Sequence: Synthetic probe
tatctctaatcaaaatcctaactctattccttcctaattctaaacccctc

SEQ ID NO: 7188 - DNA, 50 bp, Artificial Sequence
  Description of Artificial Sequence: Synthetic probe
tttattttatagatgtataaattgagttttagggggattaggaagtttgt

SEQ ID NO: 7189 - DNA, 50 bp, Artificial Sequence
  Description of Artificial Sequence: Synthetic probe
ctactaacccaactctaattttcraaaaatcaaataaccttttccctccc

SEQ ID NO: 7190 - DNA, 50 bp, Artificial Sequence
  Description of Artificial Sequence: Synthetic probe
atcaaccataccacttaacctttacaaaaaccccttaaataaaaattatc

SEQ ID NO: 7191 - DNA, 50 bp, Artificial Sequence
  Description of Artificial Sequence: Synthetic probe
raatccrttccccraaataaaactacaaatcccaaaaaatcttcctcaac

SEQ ID NO: 7192 - DNA, 50 bp, Artificial Sequence
  Description of Artificial Sequence: Synthetic probe
caacctacaaaaattttaacctcaactaaaaataaaaccaaataaaaaca

SEQ ID NO: 7193 - DNA, 50 bp, Artificial Sequence
  Description of Artificial Sequence: Synthetic probe
gtaatttgtggagattttggttttaattgaagatgaaattaggtaaaggt

SEQ ID NO: 7194 - DNA, 50 bp, Artificial Sequence
  Description of Artificial Sequence: Synthetic probe
atccatctcaataacatctactatccctaatcaacacracaccttaaaac

SEQ ID NO: 7195 - DNA, 50 bp, Artificial Sequence
  Description of Artificial Sequence: Synthetic probe
aacttctcacctaaaaacaaccaaacatataacaaaatacccatacaatc

SEQ ID NO: 7196 - DNA, 50 bp, Artificial Sequence
  Description of Artificial Sequence: Synthetic probe
caaaaatctacaaaaattcttaaaaaacctaaaccctaaaatattaaacc

SEQ ID NO: 7197 - DNA, 50 bp, Artificial Sequence
  Description of Artificial Sequence: Synthetic probe
gggttttttatttgaagatagttagatatgtggtagggtgtttatataat

SEQ ID NO: 7198 - DNA, 50 bp, Artificial Sequence
  Description of Artificial Sequence: Synthetic probe
aaatcaacctcttcacccaataaacacaaaactatattacccaaactccc

SEQ ID NO: 7199 - DNA, 50 bp, Artificial Sequence
  Description of Artificial Sequence: Synthetic probe
acaaataaaataactaaacaaaccaatccaaaaaccccraaaaacrtttc

SEQ ID NO: 7200 - DNA, 50 bp, Artificial Sequence
  Description of Artificial Sequence: Synthetic probe
tacaaataaataaaactacccraaaaatacctacrctacrtaatacraac

SEQ ID NO: 7201 - DNA, 50 bp, Artificial Sequence
  Description of Artificial Sequence: Synthetic probe
tacaataacacaatctcaactcactaaaaactctacctcctaaattcaca

SEQ ID NO: 7202 - DNA, 50 bp, Artificial Sequence
  Description of Artificial Sequence: Synthetic probe
aaatctcaaaacaatacataaaattaatctcataaccataaaactcaaac

SEQ ID NO: 7203 - DNA, 50 bp, Artificial Sequence
  Description of Artificial Sequence: Synthetic probe
aatctcaaaacaatacataaaattaatctcataaccataaaactcaaaca

SEQ ID NO: 7204 - DNA, 50 bp, Artificial Sequence
  Description of Artificial Sequence: Synthetic probe
caaatatctctaaaactaaaaacactatacatcaaccaaatttcattatc

SEQ ID NO: 7205 - DNA, 50 bp, Artificial Sequence
  Description of Artificial Sequence: Synthetic probe
accracraaaaaaacttaataaaacccrcrctccttaaaaataaaaatac

SEQ ID NO: 7206 - DNA, 50 bp, Artificial Sequence
  Description of Artificial Sequence: Synthetic probe
aactactcttcraataaccctaaaactatctattaacaaatccctcaacc

SEQ ID NO: 7207 - DNA, 50 bp, Artificial Sequence
  Description of Artificial Sequence: Synthetic probe
cataacctccrcattaaatctacctcctttactctaacacatatccaatc

SEQ ID NO: 7208 - DNA, 50 bp, Artificial Sequence
  Description of Artificial Sequence: Synthetic probe
ccattctccaatctcaaatacccaaaaacacaatacactataaaaaacca

SEQ ID NO: 7209 - DNA, 50 bp, Artificial Sequence
  Description of Artificial Sequence: Synthetic probe
ctattttatctcttcaccrtctattctaaatcatcctatccaaaaaaacc

SEQ ID NO: 7210 - DNA, 50 bp, Artificial Sequence
  Description of Artificial Sequence: Synthetic probe
aaaaaaccaaactccaatttcaaacaaatctctccaaaaacractaaaac

SEQ ID NO: 7211 - DNA, 50 bp, Artificial Sequence
  Description of Artificial Sequence: Synthetic probe
tttcaatattttaacaaccaatactatcatactaactcaataataatcac

SEQ ID NO: 7212 - DNA, 50 bp, Artificial Sequence
  Description of Artificial Sequence: Synthetic probe
ctacctcttattctctacrtatccatctttcctttataaaccccttaccc

SEQ ID NO: 7213 - DNA, 50 bp, Artificial Sequence
  Description of Artificial Sequence: Synthetic probe
aatataaatcaaactacactctaacccacatcctaactactatatatcac

SEQ ID NO: 7214 - DNA, 50 bp, Artificial Sequence
  Description of Artificial Sequence: Synthetic probe
attttatttatagtaatgatgaggaggtaaaagtgtagtgtttagagtta

SEQ ID NO: 7215 - DNA, 50 bp, Artificial Sequence
  Description of Artificial Sequence: Synthetic probe
ttatctataaaaaccrtacaaatacaaatttatctaataaaaccraacrc

SEQ ID NO: 7216 - DNA, 50 bp, Artificial Sequence
  Description of Artificial Sequence: Synthetic probe
atttatctataaaaaccrtacaaatacaaatttatctaataaaaccraac

SEQ ID NO: 7217 - DNA, 50 bp, Artificial Sequence
  Description of Artificial Sequence: Synthetic probe
caaaatttatctataaaaaccrtacaaatacaaatttatctaataaaacc

SEQ ID NO: 7218 - DNA, 50 bp, Artificial Sequence
  Description of Artificial Sequence: Synthetic probe
ttagagtttatttgtaggaatygtgtagatataaatttgtttaatggggt

SEQ ID NO: 7219 - DNA, 50 bp, Artificial Sequence
  Description of Artificial Sequence: Synthetic probe
taaacaaaaaccttataattctaatatcccaaaatttatctataaaaacc

SEQ ID NO: 7220 - DNA, 50 bp, Artificial Sequence
  Description of Artificial Sequence: Synthetic probe
tttttaaatattttaatataaaccaaaatataaccatactaactactaac

SEQ ID NO: 7221 - DNA, 50 bp, Artificial Sequence
  Description of Artificial Sequence: Synthetic probe
rcctctaacaataaatccrttacccaatacacrctataaatcaatttacc

SEQ ID NO: 7222 - DNA, 50 bp, Artificial Sequence
  Description of Artificial Sequence: Synthetic probe
ttcctcaaccctataattaaacttccttctcttctacaacacaataaccc

SEQ ID NO: 7223 - DNA, 50 bp, Artificial Sequence
  Description of Artificial Sequence: Synthetic probe
ygtttttgatagtaggttygttgtttaatgtaygttgtgagttaatttgt

SEQ ID NO: 7224 - DNA, 50 bp, Artificial Sequence
  Description of Artificial Sequence: Synthetic probe
aaattaccctaattacacrcctctaacaataaatccrttacccaatacac

SEQ ID NO: 7225 - DNA, 50 bp, Artificial Sequence
  Description of Artificial Sequence: Synthetic probe
aaacttccttctcttctacaacacaataacccracaaattaactcacaac

SEQ ID NO: 7226 - DNA, 50 bp, Artificial Sequence
  Description of Artificial Sequence: Synthetic probe
tctacaacacaataacccracaaattaactcacaacrtacattaaacaac

SEQ ID NO: 7227 - DNA, 50 bp, Artificial Sequence
  Description of Artificial Sequence: Synthetic probe
tttttatttaagatggagttgttttggttataygtttttgatagtaggtt

SEQ ID NO: 7228 - DNA, 50 bp, Artificial Sequence
  Description of Artificial Sequence: Synthetic probe
tcctattcaaaataaaattaccctaattacacrcctctaacaataaatcc

SEQ ID NO: 7229 - DNA, 50 bp, Artificial Sequence
  Description of Artificial Sequence: Synthetic probe
aaccttattttaatcaactcctattcaaaataaaattaccctaattacac

SEQ ID NO: 7230 - DNA, 50 bp, Artificial Sequence
  Description of Artificial Sequence: Synthetic probe
racaaattaactcacaacrtacattaaacaacraacctactatcaaaaac

SEQ ID NO: 7231 - DNA, 50 bp, Artificial Sequence
  Description of Artificial Sequence: Synthetic probe
taaaattacaaatataaaccrccatacccaactacacttttttttaaaac

SEQ ID NO: 7232 - DNA, 50 bp, Artificial Sequence
  Description of Artificial Sequence: Synthetic probe
caaatataaaccrccatacccaactacacttttttttaaaacraaatctc

SEQ ID NO: 7233 - DNA, 50 bp, Artificial Sequence
  Description of Artificial Sequence: Synthetic probe
ttacaaaaaatccracraatttcaaaaacattcaccatatctatataaac

SEQ ID NO: 7234 - DNA, 50 bp, Artificial Sequence
  Description of Artificial Sequence: Synthetic probe
ttctcatacacrataatactatataatcctacaaaccttaaaaaaaccac

SEQ ID NO: 7235 - DNA, 50 bp, Artificial Sequence
  Description of Artificial Sequence: Synthetic probe
tataaataaaattatcctctacccaatctaacattaatttctaaaccaac

SEQ ID NO: 7236 - DNA, 50 bp, Artificial Sequence
  Description of Artificial Sequence: Synthetic probe
tttaggttagtttttgaagattagttttgtaaaattgtatgggtttaggt

SEQ ID NO: 7237 - DNA, 50 bp, Artificial Sequence
  Description of Artificial Sequence: Synthetic probe
ttatttataaatttaaatatgygttttattttagttgtagggagtttagt

SEQ ID NO: 7238 - DNA, 50 bp, Artificial Sequence
  Description of Artificial Sequence: Synthetic probe
aaactaacctaaattacaaaataacattccacacatcctaacccaaacac

SEQ ID NO: 7239 - DNA, 50 bp, Artificial Sequence
  Description of Artificial Sequence: Synthetic probe
aaacacraaaaatcttattcrtaattaacractttaataaactaaaaacc

SEQ ID NO: 7240 - DNA, 50 bp, Artificial Sequence
  Description of Artificial Sequence: Synthetic probe
atcttattcrtaattaacractttaataaactaaaaaccrcacctaaaac

SEQ ID NO: 7241 - DNA, 50 bp, Artificial Sequence
  Description of Artificial Sequence: Synthetic probe
tcrtaattaacractttaataaactaaaaaccrcacctaaaacrctaatc

SEQ ID NO: 7242 - DNA, 50 bp, Artificial Sequence
  Description of Artificial Sequence: Synthetic probe
actttaataaactaaaaaccrcacctaaaacrctaatcraaaacatctac

SEQ ID NO: 7243 - DNA, 50 bp, Artificial Sequence
  Description of Artificial Sequence: Synthetic probe
atcaaatcraaattcctaaatctttctactccraaaaacaacttctatac

SEQ ID NO: 7244 - DNA, 50 bp, Artificial Sequence
  Description of Artificial Sequence: Synthetic probe
aaataataacctacttaaatcaaatcraaattcctaaatctttctactcc

SEQ ID NO: 7245 - DNA, 50 bp, Artificial Sequence
  Description of Artificial Sequence: Synthetic probe
aactcaaaaaccccracctaatccaaacaaactactactcctttaacctc

SEQ ID NO: 7246 - DNA, 50 bp, Artificial Sequence
  Description of Artificial Sequence: Synthetic probe
atccacccttacaacttatatcrcatcrcaacaattcctatttaatatcc

SEQ ID NO: 7247 - DNA, 50 bp, Artificial Sequence
  Description of Artificial Sequence: Synthetic probe
ctacaaatctatcaccrttaaatatccacccttacaacttatatcrcatc

SEQ ID NO: 7248 - DNA, 50 bp, Artificial Sequence; identical to SEQ ID NO: 7247
  Description of Artificial Sequence: Synthetic probe

SEQ ID NO: 7249 - DNA, 50 bp, Artificial Sequence
  Description of Artificial Sequence: Synthetic probe
tacaaatctatcaccattaaatatccacccttacaacttatatcacatca

SEQ ID NO: 7250 - DNA, 50 bp, Artificial Sequence
  Description of Artificial Sequence: Synthetic probe
aggttatttttggttgtyggatgttatyggatattaaataggaattgttg

SEQ ID NO: 7251 - DNA, 50 bp, Artificial Sequence
  Description of Artificial Sequence: Synthetic probe
ggttatttttggttgttggatgttattggatattaaataggaattgttgt

SEQ ID NO: 7252 - DNA, 50 bp, Artificial Sequence
  Description of Artificial Sequence: Synthetic probe
aaccacttttaactaccraatatcaccraacatcaaacaaaaattactac

SEQ ID NO: 7253 - DNA, 50 bp, Artificial Sequence
  Description of Artificial Sequence: Synthetic probe
accacttttaactaccaaatatcaccaaacatcaaacaaaaattactaca

SEQ ID NO: 7254 - DNA, 50 bp, Artificial Sequence
  Description of Artificial Sequence: Synthetic probe
aactcctacaaatctatcaccrttaaatatccacccttacaacttatatc

SEQ ID NO: 7255 - DNA, 50 bp, Artificial Sequence; identical to SEQ ID NO: 7254
  Description of Artificial Sequence: Synthetic probe

SEQ ID NO: 7256 - DNA, 50 bp, Artificial Sequence
  Description of Artificial Sequence: Synthetic probe
actcctacaaatctatcaccattaaatatccacccttacaacttatatca

SEQ ID NO: 7257 - DNA, 50 bp, Artificial Sequence
  Description of Artificial Sequence: Synthetic probe
atttttggttgtyggatgttatyggatattaaataggaattgttgygatg

SEQ ID NO: 7258 - DNA, 50 bp, Artificial Sequence
  Description of Artificial Sequence: Synthetic probe
tttttggttgttggatgttattggatattaaataggaattgttgtgatgt

SEQ ID NO: 7259 - DNA, 50 bp, Artificial Sequence
  Description of Artificial Sequence: Synthetic probe
cttttaactaccraatatcaccraacatcaaacaaaaattactacratac

SEQ ID NO: 7260 - DNA, 50 bp, Artificial Sequence
  Description of Artificial Sequence: Synthetic probe
ttttaactaccaaatatcaccaaacatcaaacaaaaattactacaataca

SEQ ID NO: 7261 - DNA, 50 bp, Artificial Sequence
  Description of Artificial Sequence: Synthetic probe
tactcatttatcaaaaatatatacccaaaaaaaccctaaatacttcaacc

SEQ ID NO: 7262 - DNA, 50 bp, Artificial Sequence
  Description of Artificial Sequence: Synthetic probe
gggatttatagggaagagaagaaagggttatattaaatgtgtgtttatta

SEQ ID NO: 7263 - DNA, 50 bp, Artificial Sequence
  Description of Artificial Sequence: Synthetic probe
attaacatcraaacaatattcaaattcctatactaaactcttaaatactc

SEQ ID NO: 7264 - DNA, 50 bp, Artificial Sequence
  Description of Artificial Sequence: Synthetic probe
tcrttctcttttccctaaattcaaaaacatttccccaactaatactcatc

SEQ ID NO: 7265 - DNA, 50 bp, Artificial Sequence
  Description of Artificial Sequence: Synthetic probe
acaatacraaaaacatatcatcctaatcattaccttaaaaaatcaaatac

SEQ ID NO: 7266 - DNA, 50 bp, Artificial Sequence; identical to SEQ ID NO: 7265
  Description of Artificial Sequence: Synthetic probe

SEQ ID NO: 7267 - DNA, 50 bp, Artificial Sequence
  Description of Artificial Sequence: Synthetic probe
caatacaaaaaacatatcatcctaatcattaccttaaaaaatcaaataca

SEQ ID NO: 7268 - DNA, 50 bp, Artificial Sequence
  Description of Artificial Sequence: Synthetic probe
tgatgtttatyggaatttttgtttagtttttygaggttataagattgtaa

SEQ ID NO: 7269 - DNA, 50 bp, Artificial Sequence
  Description of Artificial Sequence: Synthetic probe
gatgtttattggaatttttgtttagttttttgaggttataagattgtaat

SEQ ID NO: 7270 - DNA, 50 bp, Artificial Sequence
  Description of Artificial Sequence: Synthetic probe
taaaaatacaaaacttaatcaatctaactctaatattaaatacaaactcc

SEQ ID NO: 7271 - DNA, 50 bp, Artificial Sequence
  Description of Artificial Sequence: Synthetic probe
atctaaaacaacaattatcaaaaaataatcaaaccaataacaccaacatc

SEQ ID NO: 7272 - DNA, 50 bp, Artificial Sequence
  Description of Artificial Sequence: Synthetic probe
acattaaaatcaaattaactaaattctatatttccaactaattcctaaac

SEQ ID NO: 7273 - DNA, 50 bp, Artificial Sequence
  Description of Artificial Sequence: Synthetic probe
ccactaatctaaccaccctttaacaactactactccaaataattcaaatc

SEQ ID NO: 7274 - DNA, 50 bp, Artificial Sequence
  Description of Artificial Sequence: Synthetic probe
taaccrtaaaatcrtctttaatttacatctcactaattatattatacccc

SEQ ID NO: 7275 - DNA, 50 bp, Artificial Sequence
  Description of Artificial Sequence: Synthetic probe
ccaccrcrcccracaaaacaaatcattcttaaaaatctaaccrtaaaatc

SEQ ID NO: 7276 - DNA, 50 bp, Artificial Sequence
  Description of Artificial Sequence: Synthetic probe
agataatttaagtyggggtataatataattagtgagatgtaaattaaaga

SEQ ID NO: 7277 - DNA, 50 bp, Artificial Sequence
  Description of Artificial Sequence: Synthetic probe
aaatcraaatataacacaaccaataaaatataaaccaaaaacrattccac

SEQ ID NO: 7278 - DNA, 50 bp, Artificial Sequence
  Description of Artificial Sequence: Synthetic probe
aacrtaaaccaccrcrcccracaaaacaaatcattcttaaaaatctaacc

SEQ ID NO: 7279 - DNA, 50 bp, Artificial Sequence
  Description of Artificial Sequence: Synthetic probe
aaaccaaaaacrattccacrattaaattctcaaaaataacttattctacc

SEQ ID NO: 7280 - DNA, 50 bp, Artificial Sequence
  Description of Artificial Sequence: Synthetic probe
ttaaagaygattttayggttagatttttaagaatgatttgttttgtyggg

SEQ ID NO: 7281 - DNA, 50 bp, Artificial Sequence
  Description of Artificial Sequence: Synthetic probe
caaaaacrattccacrattaaattctcaaaaataacttattctaccraac

SEQ ID NO: 7282 - DNA, 50 bp, Artificial Sequence
  Description of Artificial Sequence: Synthetic probe
aaaacrattccacrattaaattctcaaaaataacttattctaccraacrc

SEQ ID NO: 7283 - DNA, 50 bp, Artificial Sequence
  Description of Artificial Sequence: Synthetic probe
cacrattaaattctcaaaaataacttattctaccraacrcrataactcac

SEQ ID NO: 7284 - DNA, 50 bp, Artificial Sequence
  Description of Artificial Sequence: Synthetic probe
ttactatacacaactttaaaacaccccaaatactttctacaaaaattatc

SEQ ID NO: 7285 - DNA, 50 bp, Artificial Sequence
  Description of Artificial Sequence: Synthetic probe
tgtggttttagatygaaagtatagttgttttgtaagagaggagagattta

SEQ ID NO: 7286 - DNA, 50 bp, Artificial Sequence
  Description of Artificial Sequence: Synthetic probe
ttttatatagttaagttaggtatgattattgttygtttgtggttttagat

SEQ ID NO: 7287 - DNA, 50 bp, Artificial Sequence
  Description of Artificial Sequence: Synthetic probe
tccatacaaccaaatcaaacataaccattactcrtctataaccccaaatc

SEQ ID NO: 7288 - DNA, 50 bp, Artificial Sequence
  Description of Artificial Sequence: Synthetic probe
atctctcctctcttacaaaacaactatactttcratctaaaaccacaaac

SEQ ID NO: 7289 - DNA, 50 bp, Artificial Sequence
  Description of Artificial Sequence: Synthetic probe
tttatattagygagaggttttatatagttaagttaggtatgattattgtt

SEQ ID NO: 7290 - DNA, 50 bp, Artificial Sequence
  Description of Artificial Sequence: Synthetic probe
tcacatcaacraaaaattccatacaaccaaatcaaacataaccattactc

SEQ ID NO: 7291 - DNA, 50 bp, Artificial Sequence
  Description of Artificial Sequence: Synthetic probe
aaccacaaacraacaataatcatacctaacttaactatataaaacctctc

SEQ ID NO: 7292 - DNA, 50 bp, Artificial Sequence
  Description of Artificial Sequence: Synthetic probe
cacaaaccatcracctaaatctaaacataaaaacaaatattcacatcaac

SEQ ID NO: 7293 - DNA, 50 bp, Artificial Sequence
  Description of Artificial Sequence: Synthetic probe
atggaatttttygttgatgtgaatatttgtttttatgtttagatttaggt

SEQ ID NO: 7294 - DNA, 50 bp, Artificial Sequence
  Description of Artificial Sequence: Synthetic probe
taaaacctctcrctaatataaacacctattcccatatttaaatccaaacc

SEQ ID NO: 7295 - DNA, 50 bp, Artificial Sequence
  Description of Artificial Sequence: Synthetic probe
aaaaaatcacaaataacaacacrattaacaaatccaacttcaaccttccc

SEQ ID NO: 7296 - DNA, 50 bp, Artificial Sequence
  Description of Artificial Sequence: Synthetic probe
actaacacttataaaactaaccraaaaaattaaaattaaacctatcaacc

SEQ ID NO: 7297 - DNA, 50 bp, Artificial Sequence
  Description of Artificial Sequence: Synthetic probe
ttttgtatttttaatggggtttttggttaagtataggtgtgttagttttt

SEQ ID NO: 7298 - DNA, 50 bp, Artificial Sequence
  Description of Artificial Sequence: Synthetic probe
caaaacctaaatataataaatataaaaaaaatcctttccttctactcatc

SEQ ID NO: 7299 - DNA, 50 bp, Artificial Sequence
  Description of Artificial Sequence: Synthetic probe
aaaaactacccacttaaatttaataacatattcaattcataactaaaaac

SEQ ID NO: 7300 - DNA, 50 bp, Artificial Sequence
  Description of Artificial Sequence: Synthetic probe
cacacaaccaaaaaaactaaacattcatttaaaaatacaattaataaatc

SEQ ID NO: 7301 - DNA, 50 bp, Artificial Sequence
  Description of Artificial Sequence: Synthetic probe
atcttatataaattttcctccattacaatcataaaaatttctaaaaaacc

SEQ ID NO: 7302 - DNA, 50 bp, Artificial Sequence
  Description of Artificial Sequence: Synthetic probe
aaaataaaaactataatctataccctctaccaaacrtttacrtaaaaaac

SEQ ID NO: 7303 - DNA, 50 bp, Artificial Sequence
  Description of Artificial Sequence: Synthetic probe
acaatcaccattttaattcctccttataaaaatcctaaattcaatattac

SEQ ID NO: 7304 - DNA, 50 bp, Artificial Sequence
  Description of Artificial Sequence: Synthetic probe
ttctctacactccttaatatatatatttcaaaaccaaaatcatcaccatc

SEQ ID NO: 7305 - DNA, 50 bp, Artificial Sequence
  Description of Artificial Sequence: Synthetic probe
aatttcatcattaaacataattttcctactattccaacttccctacaatc

SEQ ID NO: 7306 - DNA, 50 bp, Artificial Sequence
  Description of Artificial Sequence: Synthetic probe
atagtttttaggatattgaggtttggygtgaatttagaagatgattgtaa

SEQ ID NO: 7307 - DNA, 50 bp, Artificial Sequence
  Description of Artificial Sequence: Synthetic probe
tatctttctacrtaaacaaaacaaacrctaaattttttaaacrcaaaatc

SEQ ID NO: 7308 - DNA, 50 bp, Artificial Sequence
  Description of Artificial Sequence: Synthetic probe
tcractactatctttctacrtaaacaaaacaaacrctaaattttttaaac

SEQ ID NO: 7309 - DNA, 50 bp, Artificial Sequence
  Description of Artificial Sequence: Synthetic probe
aaactaaaataacaaaaaaaccatacccaataataaaatctcraccttac

SEQ ID NO: 7310 - DNA, 50 bp, Artificial Sequence
  Description of Artificial Sequence: Synthetic probe
acrtctaaaaaacttaacrcctattctacctacrcaaaaaaacaataacc

SEQ ID NO: 7311 - DNA, 50 bp, Artificial Sequence
  Description of Artificial Sequence: Synthetic probe
taaaaaatattcrtataacacaacatctttctaccrtaactaaacctatc

SEQ ID NO: 7312 - DNA, 50 bp, Artificial Sequence
  Description of Artificial Sequence: Synthetic probe
atttaaatatctaattccttcctacatactaaactccttaaaaaatattc

SEQ ID NO: 7313 - DNA, 50 bp, Artificial Sequence
  Description of Artificial Sequence: Synthetic probe
ttcttcttacacracaaatttaattacracaaaaaaatattataccacac

SEQ ID NO: 7314 - DNA, 50 bp, Artificial Sequence
  Description of Artificial Sequence: Synthetic probe
craaaaatatttcaaactaaaaattcctattaaaaattcccaaaactcac

SEQ ID NO: 7315 - DNA, 50 bp, Artificial Sequence
  Description of Artificial Sequence: Synthetic probe
aattttttaaatgaattattttggagagattggaggagtatttttgtagt

SEQ ID NO: 7316 - DNA, 50 bp, Artificial Sequence
  Description of Artificial Sequence: Synthetic probe
taaaaattctcaataaaaacctccaacttaaaatatcccccrctctatac

SEQ ID NO: 7317 - DNA, 50 bp, Artificial Sequence
  Description of Artificial Sequence: Synthetic probe
aacrcccaccrccccttaaaaaactattctaaacctttactcctaatatc

SEQ ID NO: 7318 - DNA, 50 bp, Artificial Sequence
  Description of Artificial Sequence: Synthetic probe
aaaaaacaattcrttaaccaatcaaataacaccacraatcttttcttccc

SEQ ID NO: 7319 - DNA, 50 bp, Artificial Sequence
  Description of Artificial Sequence: Synthetic probe
raatcttttcttcccrcttccaaccrccaatcattaaaaaccaaaaaaac

SEQ ID NO: 7320 - DNA, 50 bp, Artificial Sequence
  Description of Artificial Sequence: Synthetic probe
aaaccaaaaaaacrtaaaacrataaatcaacrcttcrtactaaactattc

SEQ ID NO: 7321 - DNA, 50 bp, Artificial Sequence
  Description of Artificial Sequence: Synthetic probe
tcttccttttctttctcccttttaccctatctcctttcttaaaactaatc

SEQ ID NO: 7322 - DNA, 50 bp, Artificial Sequence
  Description of Artificial Sequence: Synthetic probe
atataacaactacttaaaatcaataaccacaacaactaattttaattttc

SEQ ID NO: 7323 - DNA, 50 bp, Artificial Sequence
  Description of Artificial Sequence: Synthetic probe
aaaaattacaccactataatctaaccctaacaataaaacraaactatctc

SEQ ID NO: 7324 - DNA, 50 bp, Artificial Sequence
  Description of Artificial Sequence: Synthetic probe
acttaaaatcaataaccacaacaactaattttaattttcraaacaatctc

SEQ ID NO: 7325 - DNA, 50 bp, Artificial Sequence
  Description of Artificial Sequence: Synthetic probe
aactcttctataacaaaaaacttatctccaattactataattaactaaac

SEQ ID NO: 7326 - DNA, 50 bp, Artificial Sequence
  Description of Artificial Sequence: Synthetic probe
tagttaattatagtaattggagataagttttttgttatagaagagtttag

SEQ ID NO: 7327 - DNA, 50 bp, Artificial Sequence
  Description of Artificial Sequence: Synthetic probe
aaccaactacaacaactaaaaacaaaccttctattacaaaaaaatccaac

SEQ ID NO: 7328 - DNA, 50 bp, Artificial Sequence
  Description of Artificial Sequence: Synthetic probe
taaactccactccccttccccttccaatatcataaaaataaaaaccaatc

SEQ ID NO: 7329 - DNA, 50 bp, Artificial Sequence
  Description of Artificial Sequence: Synthetic probe
caatctcctcttataaataaaatttcattaaaactcactacaccattcac

SEQ ID NO: 7330 - DNA, 50 bp, Artificial Sequence
  Description of Artificial Sequence: Synthetic probe
ctattcaactctactattcaatcaaaaaaactcctataaacaatataccc

SEQ ID NO: 7331 - DNA, 50 bp, Artificial Sequence
  Description of Artificial Sequence: Synthetic probe
ctcctcaaaatataaataaatctcaataacaaacttactaaaccataaac

SEQ ID NO: 7332 - DNA, 50 bp, Artificial Sequence
  Description of Artificial Sequence: Synthetic probe
ctcaaaatacacaaaaacctatcaaactcacrcaaaacaaaaattcaacc

SEQ ID NO: 7333 - DNA, 50 bp, Artificial Sequence
  Description of Artificial Sequence: Synthetic probe
tttttttaaagtataggtgaattttagtgatagatttgttggattataag

SEQ ID NO: 7334 - DNA, 50 bp, Artificial Sequence
  Description of Artificial Sequence: Synthetic probe
atttatattttgaggaggaagttaagtaagaagaatgtgattatttggat

SEQ ID NO: 7335 - DNA, 50 bp, Artificial Sequence
  Description of Artificial Sequence: Synthetic probe
caaaaatatcrtttttccaattccttataatccttaaataatcactatac

SEQ ID NO: 7336 - DNA, 50 bp, Artificial Sequence
  Description of Artificial Sequence: Synthetic probe
ygaaagattttgttgttygattaggttattattagttttattaggagtgt

SEQ ID NO: 7337 - DNA, 50 bp, Artificial Sequence
  Description of Artificial Sequence: Synthetic probe
raaaaatcttattatccraccaaaccatcatcaacttcatcaaaaatatc

SEQ ID NO: 7338 - DNA, 50 bp, Artificial Sequence
  Description of Artificial Sequence: Synthetic probe
tagtagaaatagaaygtgtataggaatttatttygaaagattttgttgtt

SEQ ID NO: 7339 - DNA, 50 bp, Artificial Sequence
  Description of Artificial Sequence: Synthetic probe
aacaaaaataaaacrtatacaaaaacctatcccraaaaatcttattatcc

SEQ ID NO: 7340 - DNA, 50 bp, Artificial Sequence
  Description of Artificial Sequence: Synthetic probe
ataaggaattggaaaaaygatatttttgatgaagttgatgatggtttggt

SEQ ID NO: 7341 - DNA, 50 bp, Artificial Sequence
  Description of Artificial Sequence: Synthetic probe
ctccctcaattctctacaacaaaaataaaacrtatacaaaaacctatccc

SEQ ID NO: 7342 - DNA, 50 bp, Artificial Sequence
  Description of Artificial Sequence: Synthetic probe
ygatatttttgatgaagttgatgatggtttggtyggataataagattttt

SEQ ID NO: 7343 - DNA, 50 bp, Artificial Sequence
  Description of Artificial Sequence: Synthetic probe
ccaaactcrttaacracaactccctcaattctctacaacaaaaataaaac

SEQ ID NO: 7344 - DNA, 50 bp, Artificial Sequence
  Description of Artificial Sequence: Synthetic probe
taaaaacaacraaatcaaaccactctctaaaaatcaaatcaaccaaactc

SEQ ID NO: 7345 - DNA, 50 bp, Artificial Sequence
  Description of Artificial Sequence: Synthetic probe
ttgtygttaaygagtttggttgatttgatttttagagagtggtttgattt

SEQ ID NO: 7346 - DNA, 50 bp, Artificial Sequence
  Description of Artificial Sequence: Synthetic probe
aaaaaataacctaaccccrctactcctataacaaaaatcrtatctcaacc

SEQ ID NO: 7347 - DNA, 50 bp, Artificial Sequence
  Description of Artificial Sequence: Synthetic probe
tagagagtggtttgatttygttgtttttataatagagatygtgttttaat

SEQ ID NO: 7348 - DNA, 50 bp, Artificial Sequence
  Description of Artificial Sequence: Synthetic probe
ctcctataacaaaaatcrtatctcaaccraaaaaactcttattcrtcatc

SEQ ID NO: 7349 - DNA, 50 bp, Artificial Sequence
  Description of Artificial Sequence: Synthetic probe
caaaaatcrtatctcaaccraaaaaactcttattcrtcatcracaacttc

SEQ ID NO: 7350 - DNA, 50 bp, Artificial Sequence
  Description of Artificial Sequence: Synthetic probe
crtttctccatcaaatcaccacacaaatccraatcraattcrttcaaacc

SEQ ID NO: 7351 - DNA, 50 bp, Artificial Sequence
  Description of Artificial Sequence: Synthetic probe
aaccraaaaaactcttattcrtcatcracaacttcraaaaactacaaaac

SEQ ID NO: 7352 - DNA, 50 bp, Artificial Sequence
  Description of Artificial Sequence: Synthetic probe
aactcttattcrtcatcracaacttcraaaaactacaaaacracttaaac

SEQ ID NO: 7353 - DNA, 50 bp, Artificial Sequence
  Description of Artificial Sequence: Synthetic probe
rtcatcracaacttcraaaaactacaaaacracttaaacraacccrattc

SEQ ID NO: 7354 - DNA, 50 bp, Artificial Sequence
  Description of Artificial Sequence: Synthetic probe
ttaaacraacccrattcraatctatataataacttaataaaaaaacracc

SEQ ID NO: 7355 - DNA, 50 bp, Artificial Sequence
  Description of Artificial Sequence: Synthetic probe
aaaatcrtcacctaatcccraaactccttcraacacacraatttaataac

SEQ ID NO: 7356 - DNA, 50 bp, Artificial Sequence
  Description of Artificial Sequence: Synthetic probe
cccraaactaataaatttctaaaatcrtcacctaatcccraaactccttc

SEQ ID NO: 7357 - DNA, 50 bp, Artificial Sequence
  Description of Artificial Sequence: Synthetic probe
tttygttgaattttyggggttggtagatttttgagatygttatttgattt

SEQ ID NO: 7358 - DNA, 50 bp, Artificial Sequence
  Description of Artificial Sequence: Synthetic probe
ctcrttaaatccccraaactaataaatttctaaaatcrtcacctaatccc

SEQ ID NO: 7359 - DNA, 50 bp, Artificial Sequence
  Description of Artificial Sequence: Synthetic probe
ctaacctatcactctcrttaaatccccraaactaataaatttctaaaatc

SEQ ID NO: 7360 - DNA, 50 bp, Artificial Sequence
  Description of Artificial Sequence: Synthetic probe
attaatttattattttygttgaattttyggggttggtagatttttgagat

SEQ ID NO: 7361 - DNA, 50 bp, Artificial Sequence
  Description of Artificial Sequence: Synthetic probe
gttygaaggagtttygggattaggtgaygattttagaaatttattagttt

SEQ ID NO: 7362 - DNA, 50 bp, Artificial Sequence
  Description of Artificial Sequence: Synthetic probe
cccraaaaaactccraaatcaaataacratctcaaaaatctaccaacccc

SEQ ID NO: 7363 - DNA, 50 bp, Artificial Sequence
  Description of Artificial Sequence: Synthetic probe
tccraaatcaaataacratctcaaaaatctaccaaccccraaaattcaac

SEQ ID NO: 7364 - DNA, 50 bp, Artificial Sequence
  Description of Artificial Sequence: Synthetic probe
ctttctacatctcttacttcaaactaatacacaaaatccaacaaaaaaac

SEQ ID NO: 7365 - DNA, 50 bp, Artificial Sequence
  Description of Artificial Sequence: Synthetic probe
aaaacctaaccctaacctaccaaaacactacctctatatactcctctttc

SEQ ID NO: 7366 - DNA, 50 bp, Artificial Sequence
  Description of Artificial Sequence: Synthetic probe
atttacraaatcraaccctcracaccctcaaatataaacaaattaaaaac

SEQ ID NO: 7367 - DNA, 50 bp, Artificial Sequence
  Description of Artificial Sequence: Synthetic probe
aaaaaacacaaaaccttcaactaatactaaatttacraaatcraaccctc

SEQ ID NO: 7368 - DNA, 50 bp, Artificial Sequence
  Description of Artificial Sequence: Synthetic probe
cctctatatactcctctttcrtctttaacctattcacacctaaaaatacc

SEQ ID NO: 7369 - DNA, 50 bp, Artificial Sequence
  Description of Artificial Sequence: Synthetic probe
ctacaaccaaaaaacacaaaaccttcaactaatactaaatttacraaatc

SEQ ID NO: 7370 - DNA, 50 bp, Artificial Sequence
  Description of Artificial Sequence: Synthetic probe
tactcctctttcrtctttaacctattcacacctaaaaataccraaaaccc

SEQ ID NO: 7371 - DNA, 50 bp, Artificial Sequence
  Description of Artificial Sequence: Synthetic probe
cccaacaacrcaaaaatatcaacrtcaacaaccccatttctccraaaatc

SEQ ID NO: 7372 - DNA, 50 bp, Artificial Sequence
  Description of Artificial Sequence: Synthetic probe
cttaatacccaacaacrcaaaaatatcaacrtcaacaaccccatttctcc

SEQ ID NO: 7373 - DNA, 50 bp, Artificial Sequence
  Description of Artificial Sequence: Synthetic probe
ttgtagagggtatgtggatagatatatttgagttttgtgaagaygatttt

SEQ ID NO: 7374 - DNA, 50 bp, Artificial Sequence
  Description of Artificial Sequence: Synthetic probe
tacaaaaaatatataaacaaacacatttaaattttataaaaacracctcc

SEQ ID NO: 7375 - DNA, 50 bp, Artificial Sequence
  Description of Artificial Sequence: Synthetic probe
tccccrtacttcaaaaatatcttaatacccaacaacrcaaaaatatcaac

SEQ ID NO: 7376 - DNA, 50 bp, Artificial Sequence
  Description of Artificial Sequence: Synthetic probe
aaaaactctcacrctccccrtacttcaaaaatatcttaatacccaacaac

SEQ ID NO: 7377 - DNA, 50 bp, Artificial Sequence
  Description of Artificial Sequence: Synthetic probe
tataaaaacracctccraaaaaataaaattattaacrctaacatccctac

SEQ ID NO: 7378 - DNA, 50 bp, Artificial Sequence
  Description of Artificial Sequence: Synthetic probe
taagttttygtttattgagattattgattgggttttagagaagattatag

SEQ ID NO: 7379 - DNA, 50 bp, Artificial Sequence
  Description of Artificial Sequence: Synthetic probe
aagtttttgtttattgagattattgattgggttttagagaagattatagt

SEQ ID NO: 7380 - DNA, 50 bp, Artificial Sequence
  Description of Artificial Sequence: Synthetic probe
ctataatcttctctaaaacccaatcaataatctcaataacraaaacttac

SEQ ID NO: 7381 - DNA, 50 bp, Artificial Sequence
  Description of Artificial Sequence: Synthetic probe
tataatcttctctaaaacccaatcaataatctcaataacaaaaacttaca

SEQ ID NO: 7382 - DNA, 50 bp, Artificial Sequence
  Description of Artificial Sequence: Synthetic probe
tctaaaactacctaccaaaccraaacrtcctaaacaaaaaaatatatcac

SEQ ID NO: 7383 - DNA, 50 bp, Artificial Sequence
  Description of Artificial Sequence: Synthetic probe
ttttaaagttatttgttagatygagaygttttgagtagaagagtatgtta

SEQ ID NO: 7384 - DNA, 50 bp, Artificial Sequence
  Description of Artificial Sequence: Synthetic probe
aaacctaaacrcttatataccrtaacatactcttctactcaaaacrtctc

SEQ ID NO: 7385 - DNA, 50 bp, Artificial Sequence
  Description of Artificial Sequence: Synthetic probe
catacataaaaaccctaaacaccacctactctaaaactacctaccaaacc

SEQ ID NO: 7386 - DNA, 50 bp, Artificial Sequence
  Description of Artificial Sequence: Synthetic probe
caaataatattcaaaattcccatacatactctataccaacccttccracc

SEQ ID NO: 7387 - DNA, 50 bp, Artificial Sequence
  Description of Artificial Sequence: Synthetic probe
tttgtttttttaagggttattgtgaggttttagtgaagtaataagtgagt

SEQ ID NO: 7388 - DNA, 50 bp, Artificial Sequence
  Description of Artificial Sequence: Synthetic probe
aaaacaacaactccaaattcaaatcctcctacaaccttcataataacatc

SEQ ID NO: 7389 - DNA, 50 bp, Artificial Sequence
  Description of Artificial Sequence: Synthetic probe
caacttccaaaaaaaaacccaaccttcratattcaattactttccataac

SEQ ID NO: 7390 - DNA, 50 bp, Artificial Sequence
  Description of Artificial Sequence: Synthetic probe
tattatctatacccttaattcccaaacaacatcttaaaataaaattaaac

SEQ ID NO: 7391 - DNA, 50 bp, Artificial Sequence
  Description of Artificial Sequence: Synthetic probe
gttagtgtttttgagtatgatatattagttaagaatatttgtggtatgta

SEQ ID NO: 7392 - DNA, 50 bp, Artificial Sequence
  Description of Artificial Sequence: Synthetic probe
ccaatatttttaaatataacatactaactaaaaacatctataacatacac

SEQ ID NO: 7393 - DNA, 50 bp, Artificial Sequence
  Description of Artificial Sequence: Synthetic probe
tcaatcacctcactaaataaacraccttctcttttcaattcttcataaac

SEQ ID NO: 7394 - DNA, 50 bp, Artificial Sequence
  Description of Artificial Sequence: Synthetic probe
aaatataatataaaataccaaaaaacacraaataactaaaccacaacctc

SEQ ID NO: 7395 - DNA, 50 bp, Artificial Sequence
  Description of Artificial Sequence: Synthetic probe
aaaaaaatcataacraattaaaaaaactaataccccactcaaaatcccac

SEQ ID NO: 7396 - DNA, 50 bp, Artificial Sequence
  Description of Artificial Sequence: Synthetic probe
aaaaaaaccrcaactactacrtcataaaaccaaacacctaaatacctacc

SEQ ID NO: 7397 - DNA, 50 bp, Artificial Sequence
  Description of Artificial Sequence: Synthetic probe
ataaaatttttaaccttttaacattcaaaaattaaataaattctccccrc

SEQ ID NO: 7398 - DNA, 50 bp, Artificial Sequence
  Description of Artificial Sequence: Synthetic probe
aactaaataaaaaataataatattctattaatccatcactcaatatactc

SEQ ID NO: 7399 - DNA, 50 bp, Artificial Sequence
  Description of Artificial Sequence: Synthetic probe
ttttaaaaccraaataatcattttaatttttcctttcccctaccaaacac

SEQ ID NO: 7400 - DNA, 50 bp, Artificial Sequence
  Description of Artificial Sequence: Synthetic probe
atctaaccractaaaataacrtctacrcaattacrtcaaacrtcaaatcc

SEQ ID NO: 7401 - DNA, 50 bp, Artificial Sequence
  Description of Artificial Sequence: Synthetic probe
tcctctcctttcracttccccacratacctttcraaatttataatcaaac

SEQ ID NO: 7402 - DNA, 50 bp, Artificial Sequence
  Description of Artificial Sequence: Synthetic probe
actaaaaattaaaatcttacctttactctccttaaaaccractaaaacrc

SEQ ID NO: 7403 - DNA, 50 bp, Artificial Sequence
  Description of Artificial Sequence: Synthetic probe
aacraactctaaaaatcrcataaaaaaactataatatcctaaatccraac

SEQ ID NO: 7404 - DNA, 50 bp, Artificial Sequence
  Description of Artificial Sequence: Synthetic probe
aacaataaattctcraacctcaactaaatcctacattaataaatatatac

SEQ ID NO: 7405 - DNA, 50 bp, Artificial Sequence
  Description of Artificial Sequence: Synthetic probe
ttcaaatcaaataacaataaaaatatttctatacctaaatctctctccac

SEQ ID NO: 7406 - DNA, 50 bp, Artificial Sequence
  Description of Artificial Sequence: Synthetic probe
taaaactcctacaaaaacaaacacaatccactctaccctccttaaaatac

SEQ ID NO: 7407 - DNA, 50 bp, Artificial Sequence
  Description of Artificial Sequence: Synthetic probe
atttacaattatacacttcraaattttataacacatttcaacactaaacc

SEQ ID NO: 7408 - DNA, 50 bp, Artificial Sequence
  Description of Artificial Sequence: Synthetic probe
acaaatataaaccaccrcacccracaattttataaacttaaactataaac

SEQ ID NO: 7409 - DNA, 50 bp, Artificial Sequence
  Description of Artificial Sequence: Synthetic probe
taaacattattacatcccaaaaaaccccaatactccttttcaatcaatac

SEQ ID NO: 7410 - DNA, 50 bp, Artificial Sequence
  Description of Artificial Sequence: Synthetic probe
aaaactaaattaatttcaaattaaaaataaacatctaacacactcatctc

SEQ ID NO: 7411 - DNA, 50 bp, Artificial Sequence
  Description of Artificial Sequence: Synthetic probe
ataccaaatatattcaacccaatttatatctcaaattcaaaaattttatc

SEQ ID NO: 7412 - DNA, 50 bp, Artificial Sequence
  Description of Artificial Sequence: Synthetic probe
attcaattctactccaaattaatataacttttaaaaataaacatactaac

SEQ ID NO: 7413 - DNA, 50 bp, Artificial Sequence
  Description of Artificial Sequence: Synthetic probe
aaaataataaaaacaaataccctcatatacaaatcataattaaaaaaaac

SEQ ID NO: 7414 - DNA, 50 bp, Artificial Sequence
  Description of Artificial Sequence: Synthetic probe
tccctcaatccccaaaaaaaaccaacataaacaatctcctttacaatttc

SEQ ID NO: 7415 - DNA, 50 bp, Artificial Sequence
  Description of Artificial Sequence: Synthetic probe
cttctcaactcccrtcaaaatataaactccataacaacaaacctacttcc

SEQ ID NO: 7416 - DNA, 50 bp, Artificial Sequence
  Description of Artificial Sequence: Synthetic probe
rcaaactaaaaactaaaacctacaaaaacctctaaaaaaaaacctatccc

SEQ ID NO: 7417 - DNA, 50 bp, Artificial Sequence
  Description of Artificial Sequence: Synthetic probe
gtaaatagtattatttttagggttagttatgggtgtgaagtgatagagtt

SEQ ID NO: 7418 - DNA, 50 bp, Artificial Sequence
  Description of Artificial Sequence: Synthetic probe
ygtagattgaaaattaaagtttgtagagatttttgaaggaaaatttgttt

SEQ ID NO: 7419 - DNA, 50 bp, Artificial Sequence
  Description of Artificial Sequence: Synthetic probe
tctatcacttcacacccataactaaccctaaaaataatactatttacaac

SEQ ID NO: 7420 - DNA, 50 bp, Artificial Sequence
  Description of Artificial Sequence: Synthetic probe
tcccaaataaacttactaaaaaccctaaaaaactccaataatctaatacc

SEQ ID NO: 7421 - DNA, 50 bp, Artificial Sequence
  Description of Artificial Sequence: Synthetic probe
cctctactcaaactatcctttactatcctccaaacatactacctccattc

SEQ ID NO: 7422 - DNA, 50 bp, Artificial Sequence
  Description of Artificial Sequence: Synthetic probe
tacccatacatctttacaatccaacttcrcaattacttccatcaaaaaac

SEQ ID NO: 7423 - DNA, 50 bp, Artificial Sequence
  Description of Artificial Sequence: Synthetic probe
actataattctctcactatctatacccatacatctttacaatccaacttc

SEQ ID NO: 7424 - DNA, 50 bp, Artificial Sequence
  Description of Artificial Sequence: Synthetic probe
aaatcacaaaaccaacccaaattaatccrccttttaataaaaacaactac

SEQ ID NO: 7425 - DNA, 50 bp, Artificial Sequence
  Description of Artificial Sequence: Synthetic probe
ataaataaaacataaacaacactatacraataaacccrtaaataatccac

SEQ ID NO: 7426 - DNA, 50 bp, Artificial Sequence
  Description of Artificial Sequence: Synthetic probe
tatcrataaactcataaataaaacataaacaacactatacraataaaccc

SEQ ID NO: 7427 - DNA, 50 bp, Artificial Sequence
  Description of Artificial Sequence: Synthetic probe
crttccaaaatcraatttaataaattcctcaatccctaccrccrcraaac

SEQ ID NO: 7428 - DNA, 50 bp, Artificial Sequence
  Description of Artificial Sequence: Synthetic probe
aaaaaataaaacacccttccctttttctatcrctaaaatctaaaaaaaac

SEQ ID NO: 7429 - DNA, 50 bp, Artificial Sequence
  Description of Artificial Sequence: Synthetic probe
aaaaaatccaatcatatactccrtacttaataaatttctatcctaacctc

SEQ ID NO: 7430 - DNA, 50 bp, Artificial Sequence
  Description of Artificial Sequence: Synthetic probe
ttacctcttataaaccttccaatttccacctaaacacttctaaaaacaac

SEQ ID NO: 7431 - DNA, 50 bp, Artificial Sequence
  Description of Artificial Sequence: Synthetic probe
craaacrtccaaactcaactctcraccraaaccataaactcraaaattac

SEQ ID NO: 7432 - DNA, 50 bp, Artificial Sequence
  Description of Artificial Sequence: Synthetic probe
rtattattctttataaattctcraaattcraaaataactacacaatcaac

SEQ ID NO: 7433 - DNA, 50 bp, Artificial Sequence
  Description of Artificial Sequence: Synthetic probe
accrctcatttaaaaacatcttaataatactttttaacacaactttcrac

SEQ ID NO: 7434 - DNA, 50 bp, Artificial Sequence
  Description of Artificial Sequence: Synthetic probe
aatacaccttaaacctcaaaactaacaaatcatccaaattcttcaaacca

SEQ ID NO: 7435 - DNA, 50 bp, Artificial Sequence
  Description of Artificial Sequence: Synthetic probe
aaacaactatactaaacctcttccraataccaaaatataccttacacrac

SEQ ID NO: 7436 - DNA, 50 bp, Artificial Sequence
  Description of Artificial Sequence: Synthetic probe
ttttaatcctatttctcataaatattacccaaattaaaacrccrctctac

SEQ ID NO: 7437 - DNA, 50 bp, Artificial Sequence
  Description of Artificial Sequence: Synthetic probe
cccaatcaccccaatctcaaacctttaaaatcraatctaaaactaccaac

SEQ ID NO: 7438 - DNA, 50 bp, Artificial Sequence
  Description of Artificial Sequence: Synthetic probe
aaataacaatactatccccaaccatacraaaaaaactccraaaaaacaac

SEQ ID NO: 7439 - DNA, 50 bp, Artificial Sequence
  Description of Artificial Sequence: Synthetic probe
ataaaattcctttaaaaactcaaccccaaaaaactttatcccatcccctc

SEQ ID NO: 7440 - DNA, 50 bp, Artificial Sequence
  Description of Artificial Sequence: Synthetic probe
raaacaaattttccttcaaaaatctctacaaactttaattttcaatctac

SEQ ID NO: 7441 - DNA, 50 bp, Artificial Sequence
  Description of Artificial Sequence: Synthetic probe
ccatcacrcaaaaaaatcactctcttcaacaaactaaaaaccctttattc

SEQ ID NO: 7442 - DNA, 50 bp, Artificial Sequence
  Description of Artificial Sequence: Synthetic probe
caaaaccttcatcactaccttatataaatattacaactaattaataactc

SEQ ID NO: 7443 - DNA, 50 bp, Artificial Sequence
  Description of Artificial Sequence: Synthetic probe
atcaacttcaaaaattttaaaatctaactcacttaaatttacctcctaac

SEQ ID NO: 7444 - DNA, 50 bp, Artificial Sequence
  Description of Artificial Sequence: Synthetic probe
aaccttaaaaaaatccccrtatctctccaatctaaaacctaaattcaaac

SEQ ID NO: 7445 - DNA, 50 bp, Artificial Sequence
  Description of Artificial Sequence: Synthetic probe
atccrtttatttaacttaaaaccttcctactatcctcrcctatacrcctc

SEQ ID NO: 7446 - DNA, 50 bp, Artificial Sequence
  Description of Artificial Sequence: Synthetic probe
actcccracraacrcraaaaaatttattaacctaaaaactaaaatatacc

SEQ ID NO: 7447 - DNA, 50 bp, Artificial Sequence
  Description of Artificial Sequence: Synthetic probe
atttccccaaaacattcccacaaatctaattcccccraaaatttaaaaac

SEQ ID NO: 7448 - DNA, 50 bp, Artificial Sequence
  Description of Artificial Sequence: Synthetic probe
aaaaaaaactatctctaaaaccatacctcctcccrtacacaacaaaatac

SEQ ID NO: 7449 - DNA, 50 bp, Artificial Sequence
  Description of Artificial Sequence: Synthetic probe
atcttatatcctaaaccctttacaaaaacccttcccctaacaacaaatac

SEQ ID NO: 7450 - DNA, 50 bp, Artificial Sequence
  Description of Artificial Sequence: Synthetic probe
aaatatactaacactaattaaaaactctaaaaacccctccatacaaatac

SEQ ID NO: 7451 - DNA, 50 bp, Artificial Sequence
  Description of Artificial Sequence: Synthetic probe
caacttcacctacractacccccataacctaatactaaacrtaaacraac

SEQ ID NO: 7452 - DNA, 50 bp, Artificial Sequence
  Description of Artificial Sequence: Synthetic probe
aactcaaacacctttacccaatttaatttcaatttaaaccaaaatcccca

SEQ ID NO: 7453 - DNA, 50 bp, Artificial Sequence
  Description of Artificial Sequence: Synthetic probe
actcaaaatttcrctctctttcaaaaaaaattccctcrtataaacrcrtc

SEQ ID NO: 7454 - DNA, 50 bp, Artificial Sequence
  Description of Artificial Sequence: Synthetic probe
tcccaactcaaaatttcrctctctttcaaaaaaaattccctcrtataaac

SEQ ID NO: 7455 - DNA, 50 bp, Artificial Sequence
  Description of Artificial Sequence: Synthetic probe
aaaaattaaaacracrcrcccacacraaaaaatttcctttaaaaaaaaac

SEQ ID NO: 7456 - DNA, 50 bp, Artificial Sequence
  Description of Artificial Sequence: Synthetic probe
cttcccrttttctacrtaataatataaaaaaaacttcctcaaacctctcc

SEQ ID NO: 7457 - DNA, 50 bp, Artificial Sequence
  Description of Artificial Sequence: Synthetic probe
gtttttygttgtttttaggtattttggtagaatygaaagaggttttattg

SEQ ID NO: 7458 - DNA, 50 bp, Artificial Sequence
  Description of Artificial Sequence: Synthetic probe
aataatataaaaaaaacttcctcaaacctctccrcaataaaacctctttc

SEQ ID NO: 7459 - DNA, 50 bp, Artificial Sequence
  Description of Artificial Sequence: Synthetic probe
ctctccrcaataaaacctctttcrattctaccaaaatacctaaaaacaac

SEQ ID NO: 7460 - DNA, 50 bp, Artificial Sequence
  Description of Artificial Sequence: Synthetic probe
raccraaaaaaaatcccataaatactaaaacctaccacaaaaaccctcac

SEQ ID NO: 7461 - DNA, 50 bp, Artificial Sequence
  Description of Artificial Sequence: Synthetic probe
cacaaaaaccaaaccraaacraactaaaaactaacctacttcctacracc

SEQ ID NO: 7462 - DNA, 50 bp, Artificial Sequence
  Description of Artificial Sequence: Synthetic probe
tataaaaatattctaaaaaaactcctacrcrataaattactaaaaactcc

SEQ ID NO: 7463 - DNA, 50 bp, Artificial Sequence
  Description of Artificial Sequence: Synthetic probe
aaaaaaacraaatcttcaaaaaccaatcrcratccacctatcraaaaaac

SEQ ID NO: 7464 - DNA, 50 bp, Artificial Sequence
  Description of Artificial Sequence: Synthetic probe
aaaacaaaaaaatcaacaaaaacctcrctcraacrcccaataatcctacc

SEQ ID NO: 7465 - DNA, 50 bp, Artificial Sequence
  Description of Artificial Sequence: Synthetic probe
acaacctctatcctaaataacttttacctttctactaaaaaaattacaac

SEQ ID NO: 7466 - DNA, 50 bp, Artificial Sequence
  Description of Artificial Sequence: Synthetic probe
accaaccctctaaccccatcataaaatccccctttactttaataacaaac

SEQ ID NO: 7467 - DNA, 50 bp, Artificial Sequence
  Description of Artificial Sequence: Synthetic probe
gggaaatgggtygttttagatttgagtttatagttaatatatggggtttg

SEQ ID NO: 7468 - DNA, 50 bp, Artificial Sequence
  Description of Artificial Sequence: Synthetic probe
taataacaaacrcaaaccccatatattaactataaactcaaatctaaaac

SEQ ID NO: 7469 - DNA, 50 bp, Artificial Sequence
  Description of Artificial Sequence: Synthetic probe
taaaactctatctaccctaaactaaaaatcccaacttctccatcttcctc

SEQ ID NO: 7470 - DNA, 50 bp, Artificial Sequence
  Description of Artificial Sequence: Synthetic probe
tttagggtaggggatttaaagatgaaagttttggattttttataattagg

SEQ ID NO: 7471 - DNA, 50 bp, Artificial Sequence
  Description of Artificial Sequence: Synthetic probe
tattttccaaaacaaaaactaataaataactacacaaaattcactaaaac

SEQ ID NO: 7472 - DNA, 50 bp, Artificial Sequence
  Description of Artificial Sequence: Synthetic probe
ctctattccaaatatctaaaaattcrctttcaccrcaaaaaaaacattcc

SEQ ID NO: 7473 - DNA, 50 bp, Artificial Sequence
  Description of Artificial Sequence: Synthetic probe
atgttttttaggatagaaattggtgagtgattgtatagagtttattgaaa

SEQ ID NO: 7474 - DNA, 50 bp, Artificial Sequence
  Description of Artificial Sequence: Synthetic probe
tatttatactaataacaatatatctctctattccaaatatctaaaaattc

SEQ ID NO: 7475 - DNA, 50 bp, Artificial Sequence
  Description of Artificial Sequence: Synthetic probe
ataactacacaaaattcactaaaacraaataccttccttacrataaaaac

SEQ ID NO: 7476 - DNA, 50 bp, Artificial Sequence
  Description of Artificial Sequence: Synthetic probe
ttctcaaaataaaaattcacccaaaatattatctaattaattttaaaaac

SEQ ID NO: 7477 - DNA, 50 bp, Artificial Sequence
  Description of Artificial Sequence: Synthetic probe
cacattcccaacaataaactctaatttacaattattcctaaaatttctcc

SEQ ID NO: 7478 - DNA, 50 bp, Artificial Sequence
  Description of Artificial Sequence: Synthetic probe
acacataaaattacaaaaacaatcattatactaaaatacaattatcaacc

SEQ ID NO: 7479 - DNA, 50 bp, Artificial Sequence
  Description of Artificial Sequence: Synthetic probe
aactctttcraaacattacccaaaaattctctaataacctacaccatatc

SEQ ID NO: 7480 - DNA, 50 bp, Artificial Sequence
  Description of Artificial Sequence: Synthetic probe
aaatacactccctttttccttctactcactactttcccaataaaactaac

SEQ ID NO: 7481 - DNA, 50 bp, Artificial Sequence
  Description of Artificial Sequence: Synthetic probe
tttatcattaatctatacccataaccrtctttttccattaaaccttcrtc

SEQ ID NO: 7482 - DNA, 50 bp, Artificial Sequence
  Description of Artificial Sequence: Synthetic probe
ccctaaattataacrcataaactccccctcccaaaccataacaaaaccac

SEQ ID NO: 7483 - DNA, 50 bp, Artificial Sequence
  Description of Artificial Sequence: Synthetic probe
aaatttttcaaacaaattacaaaaaactaacaaatcaaccaaccccccac

SEQ ID NO: 7484 - DNA, 50 bp, Artificial Sequence
  Description of Artificial Sequence: Synthetic probe
tcctaaataacctatacccactcctatacraattaaactaaattaataac

SEQ ID NO: 7485 - DNA, 50 bp, Artificial Sequence
  Description of Artificial Sequence: Synthetic probe
acacattcatattttcttcctcccacatatctataaatcctaaaatatac

SEQ ID NO: 7486 - DNA, 50 bp, Artificial Sequence
  Description of Artificial Sequence: Synthetic probe
aaaccctactaaccctaataacaatcctataaaaaaaaccaatatccccc

SEQ ID NO: 7487 - DNA, 50 bp, Artificial Sequence
  Description of Artificial Sequence: Synthetic probe
attaaaaactcttattcttaaaaaacacccrtccccttataatccaaaac

SEQ ID NO: 7488 - DNA, 50 bp, Artificial Sequence
  Description of Artificial Sequence: Synthetic probe
gatattataagtttaygtttttatgtggggttaaatggttggtagaattt

SEQ ID NO: 7489 - DNA, 50 bp, Artificial Sequence
  Description of Artificial Sequence: Synthetic probe
acattataaatctacrcttccatataaaatcaaataactaacaaaacccc

SEQ ID NO: 7490 - DNA, 50 bp, Artificial Sequence
  Description of Artificial Sequence: Synthetic probe
caaacccctttcccccacaaattcaactctaatacttccctttaaaatac

SEQ ID NO: 7491 - DNA, 50 bp, Artificial Sequence
  Description of Artificial Sequence: Synthetic probe
aactaaaaccattaatactatatccaaatttaaaacctctcaaaaaatcc

SEQ ID NO: 7492 - DNA, 50 bp, Artificial Sequence
  Description of Artificial Sequence: Synthetic probe
atttacctacataccaaatacaatcttacacatattcatctaatcctaac

SEQ ID NO: 7493 - DNA, 50 bp, Artificial Sequence
  Description of Artificial Sequence: Synthetic probe
tttgtaagggtagtttgaaagttattaattgggtagtgagtttttttagt

SEQ ID NO: 7494 - DNA, 50 bp, Artificial Sequence
  Description of Artificial Sequence: Synthetic probe
ttataaaaataatttaaaaaccactaactaaacaataaacctccttaacc

SEQ ID NO: 7495 - DNA, 50 bp, Artificial Sequence
  Description of Artificial Sequence: Synthetic probe
caaaattctaccctctccccaccattctcataaatataacaaatataatc

SEQ ID NO: 7496 - DNA, 50 bp, Artificial Sequence
  Description of Artificial Sequence: Synthetic probe
tccactaaaatccctataatatatccactatcttcaaataccaaaaatac

SEQ ID NO: 7497 - DNA, 50 bp, Artificial Sequence
  Description of Artificial Sequence: Synthetic probe
aaaaaccctcatctccraccaataaatcctaacaacaactcattacttcc

SEQ ID NO: 7498 - DNA, 50 bp, Artificial Sequence
  Description of Artificial Sequence: Synthetic probe
acttctcttaaaaaaaattccttcccctacccttaataatctctaaaatc

SEQ ID NO: 7499 - DNA, 50 bp, Artificial Sequence
  Description of Artificial Sequence: Synthetic probe
craaaacctctaaatacccracratcaaaacractctaaaaaccctatac

SEQ ID NO: 7500 - DNA, 50 bp, Artificial Sequence
  Description of Artificial Sequence: Synthetic probe
ataactttataactttcatttcctcttaaatattataccaaaatctaacc

SEQ ID NO: 7501 - DNA, 50 bp, Artificial Sequence
  Description of Artificial Sequence: Synthetic probe
ttggttttggattgggtagtaagtttattgtagttagggtattatgttat

SEQ ID NO: 7502 - DNA, 50 bp, Artificial Sequence
  Description of Artificial Sequence: Synthetic probe
taaccttaaactaaacaacaaacctactataaccaaaataccatactacc

SEQ ID NO: 7503 - DNA, 50 bp, Artificial Sequence
  Description of Artificial Sequence: Synthetic probe
aaaatcttataatactccactccctccctcaaaccaaacrataaaaaaac

SEQ ID NO: 7504 - DNA, 50 bp, Artificial Sequence
  Description of Artificial Sequence: Synthetic probe
tttagtttttgtggtttttgggattaaatagtagtaaataatgttttgtt

SEQ ID NO: 7505 - DNA, 50 bp, Artificial Sequence
  Description of Artificial Sequence: Synthetic probe
acttcctattctctaaactccatatacttcaattaaccctttcccaatac

SEQ ID NO: 7506 - DNA, 50 bp, Artificial Sequence
  Description of Artificial Sequence: Synthetic probe
taaaaaaactccaatcrtcacaccrcaaactaaaaattacrcttcraatc

SEQ ID NO: 7507 - DNA, 50 bp, Artificial Sequence
  Description of Artificial Sequence: Synthetic probe
tataaacttcraaaaattctaccraaaatatataaacraaacrctatttc

SEQ ID NO: 7508 - DNA, 50 bp, Artificial Sequence
  Description of Artificial Sequence: Synthetic probe
ctataataaaaccatcaaattccaacctacctaattataaaaaaccatac

SEQ ID NO: 7509 - DNA, 50 bp, Artificial Sequence
  Description of Artificial Sequence: Synthetic probe
ataataactaacaatacratcccraacrcctccccrtaaaatttaccttc

SEQ ID NO: 7510 - DNA, 50 bp, Artificial Sequence
  Description of Artificial Sequence: Synthetic probe
aattatcaaaaacactaaaaaataaatatatacataccacatttaacctc

SEQ ID NO: 7511 - DNA, 50 bp, Artificial Sequence
  Description of Artificial Sequence: Synthetic probe
cacacacacacrataaaacacacaaacttactaaactaactataaacaac

SEQ ID NO: 7512 - DNA, 50 bp, Artificial Sequence
  Description of Artificial Sequence: Synthetic probe
taacctaactcctacctacatcacttatttcttaacrcctccttaaccac

SEQ ID NO: 7513 - DNA, 50 bp, Artificial Sequence
  Description of Artificial Sequence: Synthetic probe
taaaatttaaatattaaacttaaaaataaactaaccttaaaacacacaac

SEQ ID NO: 7514 - DNA, 50 bp, Artificial Sequence
  Description of Artificial Sequence: Synthetic probe
tagataaagatttttaattgaggtttataggtgagttatagtagtatgtt

SEQ ID NO: 7515 - DNA, 50 bp, Artificial Sequence
  Description of Artificial Sequence: Synthetic probe
atagaatttaaatgttgagtttgaggatagattggttttgaggtatatag

SEQ ID NO: 7516 - DNA, 50 bp, Artificial Sequence
  Description of Artificial Sequence: Synthetic probe
ttcataaataaaaccctatcctaactacctccaaaattaaataaaaactc

SEQ ID NO: 7517 - DNA, 50 bp, Artificial Sequence
  Description of Artificial Sequence: Synthetic probe
tataaataaaatactaatttacaaaatcrttctaccatatttactcatcc

SEQ ID NO: 7518 - DNA, 50 bp, Artificial Sequence
  Description of Artificial Sequence: Synthetic probe
ttggggtttagagagtagtattaaagattaagagggtttgattatttatt

SEQ ID NO: 7519 - DNA, 50 bp, Artificial Sequence
  Description of Artificial Sequence: Synthetic probe
taaaacccaaaaaacaacaccaaaaaccaaaaaaacctaattacccatcc

SEQ ID NO: 7520 - DNA, 50 bp, Artificial Sequence
  Description of Artificial Sequence: Synthetic probe
atattcraaaatttaatatacaattaaaaattaacaaatctaacacccrc

SEQ ID NO: 7521 - DNA, 50 bp, Artificial Sequence
  Description of Artificial Sequence: Synthetic probe
tttataagtttgtttgaagttaagttaaagtaatggatagaagayggtag

SEQ ID NO: 7522 - DNA, 50 bp, Artificial Sequence
  Description of Artificial Sequence: Synthetic probe
cctactattccaacttccctacaatcrttacaatcatcttctaaattcac

SEQ ID NO: 7523 - DNA, 50 bp, Artificial Sequence
  Description of Artificial Sequence: Synthetic probe
acraaacctcaaacttcaatacttacctcratatctcatacctctacaac

SEQ ID NO: 7524 - DNA, 50 bp, Artificial Sequence
  Description of Artificial Sequence: Synthetic probe
tacccaccttccttataccaataaaaatacccraattaaaacaatacccc

SEQ ID NO: 7525 - DNA, 50 bp, Artificial Sequence
  Description of Artificial Sequence: Synthetic probe
tacaaattttattataaaaatacaataactttattctctccataacttcc

SEQ ID NO: 7526 - DNA, 50 bp, Artificial Sequence
  Description of Artificial Sequence: Synthetic probe
ctcatatttaaaccttaaacaaccaaaaaaacctactcctaaaacctccc

SEQ ID NO: 7527 - DNA, 50 bp, Artificial Sequence
  Description of Artificial Sequence: Synthetic probe
tcccttaaatcatccctcccaaaacttactttttctactctaaaccraac

SEQ ID NO: 7528 - DNA, 50 bp, Artificial Sequence
  Description of Artificial Sequence: Synthetic probe
ctacttcctaaaactaaaaataaatccractccraactctcctaattaac

SEQ ID NO: 7529 - DNA, 50 bp, Artificial Sequence
  Description of Artificial Sequence: Synthetic probe
aaaaaaacaatccraacctcraacttttttaaaaataacaaattcccaac

SEQ ID NO: 7530 - DNA, 50 bp, Artificial Sequence
  Description of Artificial Sequence: Synthetic probe
ataaacacttcatttcccttctcctaaacaaaactcctaaaccctaaccc

SEQ ID NO: 7531 - DNA, 50 bp, Artificial Sequence
  Description of Artificial Sequence: Synthetic probe
tcacraaacaatatctcctaccttcttataatcacaaaactcaaacttac

SEQ ID NO: 7532 - DNA, 50 bp, Artificial Sequence
  Description of Artificial Sequence: Synthetic probe
taatactattaactccttctctactttcaaactatctcctaccactaaac

SEQ ID NO: 7533 - DNA, 50 bp, Artificial Sequence
  Description of Artificial Sequence: Synthetic probe
aactatcttacctaaaaaaaacttacatcttaaaaaatctacactaaaac

SEQ ID NO: 7534 - DNA, 50 bp, Artificial Sequence
  Description of Artificial Sequence: Synthetic probe
aaaaaaaaatctaaccttaaccttaaaaaccaaaaacraccacrtcaaac

SEQ ID NO: 7535 - DNA, 50 bp, Artificial Sequence
  Description of Artificial Sequence: Synthetic probe
aaaaaccttcctcaaataatcccttaacaactaaacacraaactactaac

SEQ ID NO: 7536 - DNA, 50 bp, Artificial Sequence
  Description of Artificial Sequence: Synthetic probe
cacctatattttaaaaaccttcctcaaataatcccttaacaactaaacac

SEQ ID NO: 7537 - DNA, 50 bp, Artificial Sequence
  Description of Artificial Sequence: Synthetic probe
ttatcctacctaaacrcraataaaaaaactaatttcctttacctcrtttc

SEQ ID NO: 7538 - DNA, 50 bp, Artificial Sequence
  Description of Artificial Sequence: Synthetic probe
aattattttttgagaagtaygggtttatattataygtatagaagaggaaa

SEQ ID NO: 7539 - DNA, 50 bp, Artificial Sequence
  Description of Artificial Sequence: Synthetic probe
gaaattagygagtagaaatgaaatygaaattgaattgttygggaaattyg

SEQ ID NO: 7540 - DNA, 50 bp, Artificial Sequence
  Description of Artificial Sequence: Synthetic probe
aaaccaacraacaaaaataaaaccraaactaaattatccraaaaattcrc

SEQ ID NO: 7541 - DNA, 50 bp, Artificial Sequence
  Description of Artificial Sequence: Synthetic probe
aacaaaaataaaaccraaactaaattatccraaaaattcrcrataaaaac

SEQ ID NO: 7542 - DNA, 50 bp, Artificial Sequence
  Description of Artificial Sequence: Synthetic probe
cttctaaaataaataaaaaatcraaaaaccraccctaatcctacaaacac

SEQ ID NO: 7543 - DNA, 50 bp, Artificial Sequence
  Description of Artificial Sequence: Synthetic probe
aaataaacccaatacaaaatcctaaaacccrtatttacaaaaccaaaacc

SEQ ID NO: 7544 - DNA, 50 bp, Artificial Sequence
  Description of Artificial Sequence: Synthetic probe
cttataacactaacctaacctctactaccaaactaaaaaccraatcaacc

SEQ ID NO: 7545 - DNA, 50 bp, Artificial Sequence
  Description of Artificial Sequence: Synthetic probe
aacaaaaaccaaaccaataccacaaaatcaaactccactaaaccctaccc

SEQ ID NO: 7546 - DNA, 50 bp, Artificial Sequence
  Description of Artificial Sequence: Synthetic probe
accttaaaattaattaaaaataacccttcctaatcataaaaatctttaac

SEQ ID NO: 7547 - DNA, 50 bp, Artificial Sequence
  Description of Artificial Sequence: Synthetic probe
taaatcaaacaaacccataaataatcctccctttaaaaactcccattctc

SEQ ID NO: 7548 - DNA, 50 bp, Artificial Sequence
  Description of Artificial Sequence: Synthetic probe
actatctttatctaaaacctatatcctaccttatttttcccatctcaaac

SEQ ID NO: 7549 - DNA, 50 bp, Artificial Sequence
  Description of Artificial Sequence: Synthetic probe
acccaaaataactaccaaccccaacaaaaaaaacaactaacttatatatc

SEQ ID NO: 7550 - DNA, 50 bp, Artificial Sequence
  Description of Artificial Sequence: Synthetic probe
aaaataactaatcaatataactaaattaccaatttcctcaaaattatcac

SEQ ID NO: 7551 - DNA, 50 bp, Artificial Sequence
  Description of Artificial Sequence: Synthetic probe
aaacaaaataaaatacaaatttcaaacaaaaacaataaattacttaaccc

SEQ ID NO: 7552 - DNA, 50 bp, Artificial Sequence
  Description of Artificial Sequence: Synthetic probe
cccaaacattatataccaataactacaaaacccctcttatcccraactcc

SEQ ID NO: 7553 - DNA, 50 bp, Artificial Sequence
  Description of Artificial Sequence: Synthetic probe
aaaaactcccaaacattatataccaataactacaaaacccctcttatccc

SEQ ID NO: 7554 - DNA, 50 bp, Artificial Sequence
  Description of Artificial Sequence: Synthetic probe
caaaatactccraaaactccctaataacccraaatcatccaaacctacac

SEQ ID NO: 7555 - DNA, 50 bp, Artificial Sequence
  Description of Artificial Sequence: Synthetic probe
cctcaaacraacctaataaaacraacatctaattcaacaaacctaaattc

SEQ ID NO: 7556 - DNA, 50 bp, Artificial Sequence
  Description of Artificial Sequence: Synthetic probe
acraacctaataaaacraacatctaattcaacaaacctaaattcraaccc

SEQ ID NO: 7557 - DNA, 50 bp, Artificial Sequence
  Description of Artificial Sequence: Synthetic probe
aacatctaattcaacaaacctaaattcraacccraaaacctacrtctccc

SEQ ID NO: 7558 - DNA, 50 bp, Artificial Sequence
  Description of Artificial Sequence: Synthetic probe
aaatttagtttttggtttygtatttgtagtatttgtttygygggaattyg

SEQ ID NO: 7559 - DNA, 50 bp, Artificial Sequence
  Description of Artificial Sequence: Synthetic probe
aaaataaaactcacaaaccctatactaaaaacractccraacrcaaaaac

SEQ ID NO: 7560 - DNA, 50 bp, Artificial Sequence
  Description of Artificial Sequence: Synthetic probe
rcraaacaaatactacaaatacraaaccaaaaactaaatttcrtttctac

SEQ ID NO: 7561 - DNA, 50 bp, Artificial Sequence
  Description of Artificial Sequence: Synthetic probe
rccrcraaaaaataaaactcacaaaccctatactaaaaacractccraac

SEQ ID NO: 7562 - DNA, 50 bp, Artificial Sequence
  Description of Artificial Sequence: Synthetic probe
tactacaaatacraaaccaaaaactaaatttcrtttctacrcccraaacc

SEQ ID NO: 7563 - DNA, 50 bp, Artificial Sequence
  Description of Artificial Sequence: Synthetic probe
tctacrcccraaaccrccctcaacacaaaatctataaatttcatttcttc

SEQ ID NO: 7564 - DNA, 50 bp, Artificial Sequence
  Description of Artificial Sequence: Synthetic probe
acaaaatctataaatttcatttcttcrcracrcraaacraaactaaacrc

SEQ ID NO: 7565 - DNA, 50 bp, Artificial Sequence
  Description of Artificial Sequence: Synthetic probe
tagttaggtttattttagttgttatgttaattaggttttttgtatttgtg

SEQ ID NO: 7566 - DNA, 50 bp, Artificial Sequence
  Description of Artificial Sequence: Synthetic probe
aatcaaattcattttaattattatattaaccaaatttcctacacctatac

SEQ ID NO: 7567 - DNA, 50 bp, Artificial Sequence
  Description of Artificial Sequence: Synthetic probe
aacraaatccctaaaaaaacaaatttccctccaccacccaacactaaaac

SEQ ID NO: 7568 - DNA, 50 bp, Artificial Sequence
  Description of Artificial Sequence: Synthetic probe
ggttttggaggttagtttattgatagttattttagggagtttagaagttt

SEQ ID NO: 7569 - DNA, 50 bp, Artificial Sequence
  Description of Artificial Sequence: Synthetic probe
actctaaaaaccaacccactaacaaccactccaaaaaatccaaaaatccc

SEQ ID NO: 7570 - DNA, 50 bp, Artificial Sequence
  Description of Artificial Sequence: Synthetic probe
tgagatttttgaaagtttatttttgattttggtagttgggtagtygagga

SEQ ID NO: 7571 - DNA, 50 bp, Artificial Sequence
  Description of Artificial Sequence: Synthetic probe
aaaatttctaaaaacttattcctaactttaacaactaaacaaccraaaac

SEQ ID NO: 7572 - DNA, 50 bp, Artificial Sequence
  Description of Artificial Sequence: Synthetic probe
tggtagtgagatttttgaaagtttatttttgattttggtagttgggtagt

SEQ ID NO: 7573 - DNA, 50 bp, Artificial Sequence
  Description of Artificial Sequence: Synthetic probe
aacaataaaatttctaaaaacttattcctaactttaacaactaaacaacc

SEQ ID NO: 7574 - DNA, 50 bp, Artificial Sequence
  Description of Artificial Sequence: Synthetic probe
aactaccaaaatcaaaaataaactttcaaaaatctcactaccaaaattcc

SEQ ID NO: 7575 - DNA, 50 bp, Artificial Sequence
  Description of Artificial Sequence: Synthetic probe
caaaatcaaaaataaactttcaaaaatctcactaccaaaattccraaaac

SEQ ID NO: 7576 - DNA, 50 bp, Artificial Sequence
  Description of Artificial Sequence: Synthetic probe
tctcactaccaaaattccraaaacrcttcaaacattactaatcccttatc

SEQ ID NO: 7577 - DNA, 50 bp, Artificial Sequence
  Description of Artificial Sequence: Synthetic probe
caataaataaaaacccaataacacrcacacctataaaaaatcrcaaaaac

SEQ ID NO: 7578 - DNA, 50 bp, Artificial Sequence
  Description of Artificial Sequence: Synthetic probe
aaaaaccccaataaataaaaacccaataacacrcacacctataaaaaatc

SEQ ID NO: 7579 - DNA, 50 bp, Artificial Sequence
  Description of Artificial Sequence: Synthetic probe
tagagattttagtgaataaggatttagtggtaygtatatttgtggaggat

SEQ ID NO: 7580 - DNA, 50 bp, Artificial Sequence
  Description of Artificial Sequence: Synthetic probe
ttcaaacattactaatcccttatcrcttttacratcctccacaaatatac

SEQ ID NO: 7581 - DNA, 50 bp, Artificial Sequence
  Description of Artificial Sequence: Synthetic probe
gttgtggtttaatgttattagagattttagtgaataaggatttagtggta

SEQ ID NO: 7582 - DNA, 50 bp, Artificial Sequence
  Description of Artificial Sequence: Synthetic probe
cacaaatcattattatatatcataaacacaaacctaccctaaacaaaaac

SEQ ID NO: 7583 - DNA, 50 bp, Artificial Sequence
  Description of Artificial Sequence: Synthetic probe
aaactcttctcacatcctaaacaactacccctatacaaaaacttccttcc

SEQ ID NO: 7584 - DNA, 50 bp, Artificial Sequence
  Description of Artificial Sequence: Synthetic probe
ttataagttattattatatattatgggtataaatttgttttgggtaggga

SEQ ID NO: 7585 - DNA, 50 bp, Artificial Sequence
  Description of Artificial Sequence: Synthetic probe
tttatgtttatttaatattttaggttttgattagtggggttgtgtagtag

SEQ ID NO: 7586 - DNA, 50 bp, Artificial Sequence
  Description of Artificial Sequence: Synthetic probe
ccatacccacctaacatctcaaactctaaccaataaaactatacaataac

SEQ ID NO: 7587 - DNA, 50 bp, Artificial Sequence
  Description of Artificial Sequence: Synthetic probe
ratttaaactcccraaattaccctacccctaaaatccaaactaatattcc

SEQ ID NO: 7588 - DNA, 50 bp, Artificial Sequence
  Description of Artificial Sequence: Synthetic probe
aataatatataaaaatactctccttacttcccctcrcaaaaatctccccc

SEQ ID NO: 7589 - DNA, 50 bp, Artificial Sequence
  Description of Artificial Sequence: Synthetic probe
ttctaaaaaatcaaaatcracttcaaaacacacccctcctacacttaccc

SEQ ID NO: 7590 - DNA, 50 bp, Artificial Sequence
  Description of Artificial Sequence: Synthetic probe
cttaaaatcaaacaaaatatacaaataaaacccaaacccrcraaacaccc

SEQ ID NO: 7591 - DNA, 50 bp, Artificial Sequence
  Description of Artificial Sequence: Synthetic probe
atttaaaactcacrtattttttaaactaaaaatttaaatatcaaattacc

SEQ ID NO: 7592 - DNA, 50 bp, Artificial Sequence
  Description of Artificial Sequence: Synthetic probe
tattttctaaaactatctcctatcataattttaaattaaacttcaaaaac

SEQ ID NO: 7593 - DNA, 50 bp, Artificial Sequence
  Description of Artificial Sequence: Synthetic probe
caaaaaaaccaaaatcaaataaaaacaaacrctacctccctactcaaaac

SEQ ID NO: 7594 - DNA, 50 bp, Artificial Sequence
  Description of Artificial Sequence: Synthetic probe
ccctaaaaataaaaactctaactaattattcataataatatccccaaaac

SEQ ID NO: 7595 - DNA, 50 bp, Artificial Sequence
  Description of Artificial Sequence: Synthetic probe
raactctaaatataaaacaaaacctaaccctaccaaccatcrccrtcatc

SEQ ID NO: 7596 - DNA, 50 bp, Artificial Sequence
  Description of Artificial Sequence: Synthetic probe
aactctaaatataaaacaaaacctaaccctaccaaccatcaccatcatca

SEQ ID NO: 7597 - DNA, 50 bp, Artificial Sequence
  Description of Artificial Sequence: Synthetic probe
aatttttgatagtgtttttaatayggagtttttgttygagttttggtttt

SEQ ID NO: 7598 - DNA, 50 bp, Artificial Sequence
  Description of Artificial Sequence: Synthetic probe
atttttgatagtgtttttaatatggagtttttgtttgagttttggttttt

SEQ ID NO: 7599 - DNA, 50 bp, Artificial Sequence
  Description of Artificial Sequence: Synthetic probe
aaataaattccataatccttattaaaaaacaaacataatcacacacacac

SEQ ID NO: 7600 - DNA, 50 bp, Artificial Sequence
  Description of Artificial Sequence: Synthetic probe
ctaacctttttcaaattttcaactcaacaccaaaatacaaaatcttccac

SEQ ID NO: 7601 - DNA, 50 bp, Artificial Sequence
  Description of Artificial Sequence: Synthetic probe
ataatcractaaaaacaaccctattatacacccrcattcctaaaaaccac

SEQ ID NO: 7602 - DNA, 50 bp, Artificial Sequence
  Description of Artificial Sequence: Synthetic probe
aaaactctacactcatcataatcractaaaaacaaccctattatacaccc

SEQ ID NO: 7603 - DNA, 50 bp, Artificial Sequence
  Description of Artificial Sequence: Synthetic probe
ttttaatttagtattagagtgtaaggttttttaygtggtttttaggaatg

SEQ ID NO: 7604 - DNA, 50 bp, Artificial Sequence
  Description of Artificial Sequence: Synthetic probe
ctctttctacatacaataaaaccccaaaaaactctacactcatcataatc

SEQ ID NO: 7605 - DNA, 50 bp, Artificial Sequence
  Description of Artificial Sequence: Synthetic probe
ttccacrtaatccccaaaaatacraatacataacaaaattatttccaacc

SEQ ID NO: 7606 - DNA, 50 bp, Artificial Sequence
  Description of Artificial Sequence: Synthetic probe
cataaaaattaattttttacctctacaccaaatcaaattcataaattccc

SEQ ID NO: 7607 - DNA, 50 bp, Artificial Sequence
  Description of Artificial Sequence: Synthetic probe
aattcccrttcraattttcttacctaaacaaatacccttataactaaacc

SEQ ID NO: 7608 - DNA, 50 bp, Artificial Sequence
  Description of Artificial Sequence: Synthetic probe
acatctaaaaataccaactaacatataaaaactacacctttaaatatatc

SEQ ID NO: 7609 - DNA, 50 bp, Artificial Sequence
  Description of Artificial Sequence: Synthetic probe
tattactaaaactaacctctaactacccctcactaacttataaatccacc

SEQ ID NO: 7610 - DNA, 50 bp, Artificial Sequence
  Description of Artificial Sequence: Synthetic probe
tatttaaaggtgtagtttttatatgttagttggtatttttagatgtttgt

SEQ ID NO: 7611 - DNA, 50 bp, Artificial Sequence
  Description of Artificial Sequence: Synthetic probe
atttaaaaatacaactttcacatatcaactaacatttttaaatatttacc

SEQ ID NO: 7612 - DNA, 50 bp, Artificial Sequence
  Description of Artificial Sequence: Synthetic probe
aatctccctccaaaaaatttacctaatataaccacaaaaaaactactccc

SEQ ID NO: 7613 - DNA, 50 bp, Artificial Sequence
  Description of Artificial Sequence: Synthetic probe
aaaatttacctaatataaccacaaaaaaactactcccraatcactctacc

SEQ ID NO: 7614 - DNA, 50 bp, Artificial Sequence
  Description of Artificial Sequence: Synthetic probe
aacctcataaacaacactataacacccactatacataaatcctaaacccc

SEQ ID NO: 7615 - DNA, 50 bp, Artificial Sequence
  Description of Artificial Sequence: Synthetic probe
taaaacccatacacaataaataccacaatactactcataaaactactatc

SEQ ID NO: 7616 - DNA, 50 bp, Artificial Sequence
  Description of Artificial Sequence: Synthetic probe
aaaaccaaaaaatcaaataacccacacaactcctctacaaaaaaaaaccc

SEQ ID NO: 7617 - DNA, 50 bp, Artificial Sequence
  Description of Artificial Sequence: Synthetic probe
atatcaataaaatatattccaaaattcttaattaacctaaaaaataaatc

SEQ ID NO: 7618 - DNA, 50 bp, Artificial Sequence
  Description of Artificial Sequence: Synthetic probe
cctaattaataaccacatctctataccataaaaataatacccccaacccc

SEQ ID NO: 7619 - DNA, 50 bp, Artificial Sequence
  Description of Artificial Sequence: Synthetic probe
tgttggagaggtatatagtaggggtttgaatatagaagtttttgttttta

SEQ ID NO: 7620 - DNA, 50 bp, Artificial Sequence
  Description of Artificial Sequence: Synthetic probe
tcataacacaaaaatataatcatcaaccaaaaaactcttaaaacctcacc

SEQ ID NO: 7621 - DNA, 50 bp, Artificial Sequence
  Description of Artificial Sequence: Synthetic probe
atcaatcctccatcataccttcataataaaacctccataaaaccttctcc

SEQ ID NO: 7622 - DNA, 50 bp, Artificial Sequence
  Description of Artificial Sequence: Synthetic probe
ataacacaaaaatataatcatcaaccaaaaaactcttaaaacctcaccrc

SEQ ID NO: 7623 - DNA, 50 bp, Artificial Sequence
  Description of Artificial Sequence: Synthetic probe
caatcctaaaactatataaaaacccaccaaacatcatctcttcaaaacac

SEQ ID NO: 7624 - DNA, 50 bp, Artificial Sequence
  Description of Artificial Sequence: Synthetic probe
taacataaaacccctacatctcttaaaatatccaaccttaaaaatatctc

SEQ ID NO: 7625 - DNA, 50 bp, Artificial Sequence
  Description of Artificial Sequence: Synthetic probe
caattataaaaccattaactttactcctcraaaatttcaaataaacaacc

SEQ ID NO: 7626 - DNA, 50 bp, Artificial Sequence
  Description of Artificial Sequence: Synthetic probe
ttccaaacacatctacacrtacaattataaaaccattaactttactcctc

SEQ ID NO: 7627 - DNA, 50 bp, Artificial Sequence
  Description of Artificial Sequence: Synthetic probe
actactatactaacttcacactcaaaatcractatttatttaaaatctcc

SEQ ID NO: 7628 - DNA, 50 bp, Artificial Sequence
  Description of Artificial Sequence: Synthetic probe
craacaatataaactcattatcaatcatatcrcttcatcctcacatcaac

SEQ ID NO: 7629 - DNA, 50 bp, Artificial Sequence
  Description of Artificial Sequence: Synthetic probe
ccrtatcttcattaataaaacataaatatcaacaatacccacctcacaac

SEQ ID NO: 7630 - DNA, 50 bp, Artificial Sequence
  Description of Artificial Sequence: Synthetic probe
taatataatcaatatccctaaatttcctttaaatatattcaaacaactcc

SEQ ID NO: 7631 - DNA, 50 bp, Artificial Sequence
  Description of Artificial Sequence: Synthetic probe
caaccaaataacctaaaacactatcratataactatccccacccctcaac

SEQ ID NO: 7632 - DNA, 50 bp, Artificial Sequence
  Description of Artificial Sequence: Synthetic probe
taacttatccaacccacaaaaactactacctaaaaaacctatacaacaac

SEQ ID NO: 7633 - DNA, 50 bp, Artificial Sequence
  Description of Artificial Sequence: Synthetic probe
ataactactacaaccaaaatacctacaaaaaccacataacttaccacrac

SEQ ID NO: 7634 - DNA, 50 bp, Artificial Sequence
  Description of Artificial Sequence: Synthetic probe
gtgatttatttagtttatagggattgttatttgggagatttgtgtaatag

SEQ ID NO: 7635 - DNA, 50 bp, Artificial Sequence
  Description of Artificial Sequence: Synthetic probe
ccttcttcacaaaaaccraacataatacattctttcactaaccctctacc

SEQ ID NO: 7636 - DNA, 50 bp, Artificial Sequence
  Description of Artificial Sequence: Synthetic probe
cracaatacccatctaaacrcccctcctacttcctctaaactataaatac

SEQ ID NO: 7637 - DNA, 50 bp, Artificial Sequence
  Description of Artificial Sequence: Synthetic probe
cctatcctctccttcaatccrtaaccaatccttatataaacrccaaaatc

SEQ ID NO: 7638 - DNA, 50 bp, Artificial Sequence
  Description of Artificial Sequence: Synthetic probe
taaattttatatgttgaaattttgattttaaatgatggtattgyggggtg

SEQ ID NO: 7639 - DNA, 50 bp, Artificial Sequence
  Description of Artificial Sequence: Synthetic probe
ctataactacaattcaatatcaaaatacctcaaactcactcatctctccc

SEQ ID NO: 7640 - DNA, 50 bp, Artificial Sequence
  Description of Artificial Sequence: Synthetic probe
ttttcaacrcttaccatccctctaaactcttaacaaactaaactacatcc

SEQ ID NO: 7641 - DNA, 50 bp, Artificial Sequence
  Description of Artificial Sequence: Synthetic probe
aatcccttattaaacaaaaaacataacttatacccataatcctaaaaatc

SEQ ID NO: 7642 - DNA, 50 bp, Artificial Sequence
  Description of Artificial Sequence: Synthetic probe
aacttataaatcccaaatcctcattacaataataaacrctaaatactcac

SEQ ID NO: 7643 - DNA, 50 bp, Artificial Sequence
  Description of Artificial Sequence: Synthetic probe
aaataaaatttcactatattaacaaaaataatcttaatctcctaacctca

SEQ ID NO: 7644 - DNA, 50 bp, Artificial Sequence
  Description of Artificial Sequence: Synthetic probe
ctcaactacctcatctataaaataaaataataatatctctctcacttatc

SEQ ID NO: 7645 - DNA, 50 bp, Artificial Sequence
  Description of Artificial Sequence: Synthetic probe
attcaatttaatacacrttcaacrtcaatttttttcaatcactatactac

SEQ ID NO: 7646 - DNA, 50 bp, Artificial Sequence
  Description of Artificial Sequence: Synthetic probe
aaaactaaaaaacaaaatctaaacrtcttacrcrcctccatcttcaaaac

SEQ ID NO: 7647 - DNA, 50 bp, Artificial Sequence
  Description of Artificial Sequence: Synthetic probe
taacataccctcttataacttcataccttcaaaaccctaactaattaaac

SEQ ID NO: 7648 - DNA, 50 bp, Artificial Sequence
  Description of Artificial Sequence: Synthetic probe
raaaaaaatcrcrtaaacrtaacctacctaaacccrccaaaaatataacc

SEQ ID NO: 7649 - DNA, 50 bp, Artificial Sequence
  Description of Artificial Sequence: Synthetic probe
tattaacaactaacaccaatacrattccattataatcatcatttctaaac

SEQ ID NO: 7650 - DNA, 50 bp, Artificial Sequence
  Description of Artificial Sequence: Synthetic probe
agatagaaagttgtatagaaagtttgttgggggaatttttaatagtttga

SEQ ID NO: 7651 - DNA, 50 bp, Artificial Sequence
  Description of Artificial Sequence: Synthetic probe
aacaaaaaattacacaaaaaatctattaaaaaaaccttcaacaatctaac

SEQ ID NO: 7652 - DNA, 50 bp, Artificial Sequence
  Description of Artificial Sequence: Synthetic probe
atattggtagttggtattagtgyggttttattgtgattattatttttgaa

SEQ ID NO: 7653 - DNA, 50 bp, Artificial Sequence
  Description of Artificial Sequence: Synthetic probe
racttaatacraaatatataatccraaatatcaacccccccccaaaaaac

SEQ ID NO: 7654 - DNA, 50 bp, Artificial Sequence
  Description of Artificial Sequence: Synthetic probe
atcrataccratcatataccaaacrtccattaacctctaaaccaataaac

SEQ ID NO: 7655 - DNA, 50 bp, Artificial Sequence
  Description of Artificial Sequence: Synthetic probe
tttttttaagggttattgtgaggttttagtgaagtaataagtgagtyggt

SEQ ID NO: 7656 - DNA, 50 bp, Artificial Sequence
  Description of Artificial Sequence: Synthetic probe
aaatttaaaataaaaaatccttctcaaaccctcccactccttaaaacctc

SEQ ID NO: 7657 - DNA, 50 bp, Artificial Sequence
  Description of Artificial Sequence: Synthetic probe
crctaaacacaacctaaccttaaaaaaaacttaactacctaactaaaacc

SEQ ID NO: 7658 - DNA, 50 bp, Artificial Sequence
  Description of Artificial Sequence: Synthetic probe
ataaaaaattaaaaactactaaattaaatcttataaaaacctttccaacc

SEQ ID NO: 7659 - DNA, 50 bp, Artificial Sequence
  Description of Artificial Sequence: Synthetic probe
caatcctaactttactataataaaaaccacctcctatccctaaaccctac

SEQ ID NO: 7660 - DNA, 50 bp, Artificial Sequence
  Description of Artificial Sequence: Synthetic probe
tcactacaaaaatattaatatatttaactaaaaaaaactactacraatac

SEQ ID NO: 7661 - DNA, 50 bp, Artificial Sequence
  Description of Artificial Sequence: Synthetic probe
ggatttttagaaaggtaatggggtgtaggtatygtgtattatgtaattta

SEQ ID NO: 7662 - DNA, 50 bp, Artificial Sequence
  Description of Artificial Sequence: Synthetic probe
taaaaaaataataaaatacaaatatcrtatactatataacccacrcaccc

SEQ ID NO: 7663 - DNA, 50 bp, Artificial Sequence
  Description of Artificial Sequence: Synthetic probe
tattttagtgtttaggttgtgttttgttttaattaaattagagtgtttgg

SEQ ID NO: 7664 - DNA, 50 bp, Artificial Sequence
  Description of Artificial Sequence: Synthetic probe
atctcaatacttaaattataccctatctcaattaaatcaaaatatttaac

SEQ ID NO: 7665 - DNA, 50 bp, Artificial Sequence
  Description of Artificial Sequence: Synthetic probe
aaaaaaactaaaaacccccaattaccaatacatctattttcaaaaccrac

SEQ ID NO: 7666 - DNA, 50 bp, Artificial Sequence
  Description of Artificial Sequence: Synthetic probe
ccattccttttaacttttaccaatctaataaatataaaatatatcttttc

SEQ ID NO: 7667 - DNA, 50 bp, Artificial Sequence
  Description of Artificial Sequence: Synthetic probe
gaaataatggatatatttgttttgtggttatagtaatataggtagtggtt

SEQ ID NO: 7668 - DNA, 50 bp, Artificial Sequence
  Description of Artificial Sequence: Synthetic probe
aaataataaacacacttatcctataatcacaacaacataaacaataaccc

SEQ ID NO: 7669 - DNA, 50 bp, Artificial Sequence
  Description of Artificial Sequence: Synthetic probe
aaaaaccactaatatcaaattcctctatattctaaaaaaatattctaacc

SEQ ID NO: 7670 - DNA, 50 bp, Artificial Sequence
  Description of Artificial Sequence: Synthetic probe
aaataaccttcatacctatcccaaataaatcatcaaaaccacacaaaacc

SEQ ID NO: 7671 - DNA, 50 bp, Artificial Sequence
  Description of Artificial Sequence: Synthetic probe
ttcactatttataaataacaccaataacataaaatataataaccraatac

SEQ ID NO: 7672 - DNA, 50 bp, Artificial Sequence
  Description of Artificial Sequence: Synthetic probe
rcraaaataaactcatataaaactaccctaaactaacaaaaaccattccc

SEQ ID NO: 7673 - DNA, 50 bp, Artificial Sequence
  Description of Artificial Sequence: Synthetic probe
cataataaaaccraattctaaaacccaaaccaatcttctaaatactacrc

SEQ ID NO: 7674 - DNA, 50 bp, Artificial Sequence
  Description of Artificial Sequence: Synthetic probe
acttaactcctacctacaaaataattaaaatccraataatacctaacctc

SEQ ID NO: 7675 - DNA, 50 bp, Artificial Sequence
  Description of Artificial Sequence: Synthetic probe
cttaactcctacctacaaaataattaaaatccaaataatacctaacctca

SEQ ID NO: 7676 - DNA, 50 bp, Artificial Sequence
  Description of Artificial Sequence: Synthetic probe
atttactttcccaactaacttaactcctacctacaaaataattaaaatcc

SEQ ID NO: 7677 - DNA, 50 bp, Artificial Sequence
  Description of Artificial Sequence: Synthetic probe
tttactttcccaactaacttaactcctacctacaaaataattaaaatcca

SEQ ID NO: 7678 - DNA, 50 bp, Artificial Sequence
  Description of Artificial Sequence: Synthetic probe
aaagaaaaayggaaatataaggttttttgtgtagaggtaaatttttttta

SEQ ID NO: 7679 - DNA, 50 bp, Artificial Sequence
  Description of Artificial Sequence: Synthetic probe
aagaaaaatggaaatataaggttttttgtgtagaggtaaattttttttat

SEQ ID NO: 7680 - DNA, 50 bp, Artificial Sequence
  Description of Artificial Sequence: Synthetic probe
aatcraatcrtaaaaaaaatttacctctacacaaaaaaccttatatttcc

SEQ ID NO: 7681 - DNA, 50 bp, Artificial Sequence
  Description of Artificial Sequence: Synthetic probe
aataataaaatttctttttcttatcacaccraatctttaaaataaactac

SEQ ID NO: 7682 - DNA, 50 bp, Artificial Sequence
  Description of Artificial Sequence: Synthetic probe
atttctttttcttatcacaccraatctttaaaataaactacrtaaatcac

SEQ ID NO: 7683 - DNA, 50 bp, Artificial Sequence
  Description of Artificial Sequence: Synthetic probe
tccctacctacaatcaataaaaaacccactaaacctacactatccatatc

SEQ ID NO: 7684 - DNA, 50 bp, Artificial Sequence
  Description of Artificial Sequence: Synthetic probe
ttttttgtttgtagttagtggggagtttattggatttgtattgtttatgt

SEQ ID NO: 7685 - DNA, 50 bp, Artificial Sequence
  Description of Artificial Sequence: Synthetic probe
caaactaaactacttcctcttacccccatatcacraaacaacaataactc

SEQ ID NO: 7686 - DNA, 50 bp, Artificial Sequence
  Description of Artificial Sequence: Synthetic probe
taaaaaaacaatatatcaaactaaactacttcctcttacccccatatcac

SEQ ID NO: 7687 - DNA, 50 bp, Artificial Sequence; identical to SEQ ID NO: 7686
  Description of Artificial Sequence: Synthetic probe

SEQ ID NO: 7688 - DNA, 50 bp, Artificial Sequence
  Description of Artificial Sequence: Synthetic probe
aaaaaaacaatatatcaaactaaactacttcctcttacccccatatcaca

SEQ ID NO: 7689 - DNA, 50 bp, Artificial Sequence
  Description of Artificial Sequence: Synthetic probe
aaaaaatactccaaacaaaataacctaaaatatcraatcactactactcc

SEQ ID NO: 7690 - DNA, 50 bp, Artificial Sequence
  Description of Artificial Sequence: Synthetic probe
aaaaatactccaaacaaaataacctaaaatatcaaatcactactactcca

SEQ ID NO: 7691 - DNA, 50 bp, Artificial Sequence
  Description of Artificial Sequence: Synthetic probe
aaaacccaaaaaaccaatattaaaaacaaattcctctcccatcctacacc

SEQ ID NO: 7692 - DNA, 50 bp, Artificial Sequence
  Description of Artificial Sequence: Synthetic probe
ataaaataaaaaaattactacttccaaaaaacracracraccrctacaac

SEQ ID NO: 7693 - DNA, 50 bp, Artificial Sequence
  Description of Artificial Sequence: Synthetic probe
cttctctaaaaacccaacacctaataaaaataaaaactatatccacttca

SEQ ID NO: 7694 - DNA, 50 bp, Artificial Sequence
  Description of Artificial Sequence: Synthetic probe
aaaaaaacracataaaaaaactcaacaacaaaataaaccrcctcrtttcc

SEQ ID NO: 7695 - DNA, 50 bp, Artificial Sequence
  Description of Artificial Sequence: Synthetic probe
acrcracctaactaaatttataaaaatataacttaaataccacaacttcc

SEQ ID NO: 7696 - DNA, 50 bp, Artificial Sequence
  Description of Artificial Sequence: Synthetic probe
aactcaacttctatacctatacctaactatataacttaatacaaatcatc

SEQ ID NO: 7697 - DNA, 50 bp, Artificial Sequence
  Description of Artificial Sequence: Synthetic probe
tagtttagtttttgtgtttgtatttggttatgtggtttggtataagttat

SEQ ID NO: 7698 - DNA, 50 bp, Artificial Sequence
  Description of Artificial Sequence: Synthetic probe
tttttctaacrctccaaaacaatattaccaatacccatcaaatacctacc

SEQ ID NO: 7699 - DNA, 50 bp, Artificial Sequence
  Description of Artificial Sequence: Synthetic probe
aaaaaaaacraaaatatcccrcrcttacrcactacaaactcraaaaaaac

SEQ ID NO: 7700 - DNA, 50 bp, Artificial Sequence
  Description of Artificial Sequence: Synthetic probe
craacccaatcaaccacraccaaaaaaaacaacrctaaaacctcaatcac

SEQ ID NO: 7701 - DNA, 50 bp, Artificial Sequence
  Description of Artificial Sequence: Synthetic probe
ttaactaaattttaaccrtatttccatttaacrtccaaaacaacraaaac

SEQ ID NO: 7702 - DNA, 50 bp, Artificial Sequence
  Description of Artificial Sequence: Synthetic probe
aaaatacraaaactaaaactcttaccaaacctacraaaactcaaccctcc

SEQ ID NO: 7703 - DNA, 50 bp, Artificial Sequence
  Description of Artificial Sequence: Synthetic probe
craaaaccrcrccraaactcrtatcaataaaaactaaaatatcracraac

SEQ ID NO: 7704 - DNA, 50 bp, Artificial Sequence
  Description of Artificial Sequence: Synthetic probe
aattttactatactacctccccttattcctcaacataaaattcccacctc

SEQ ID NO: 7705 - DNA, 50 bp, Artificial Sequence
  Description of Artificial Sequence: Synthetic probe
aatctatacataaaccttaatattccatatctcctcttcccaatactcca

SEQ ID NO: 7706 - DNA, 50 bp, Artificial Sequence
  Description of Artificial Sequence: Synthetic probe
caacaaatatcccaacattaactactctacacaacctctactttcattcc

SEQ ID NO: 7707 - DNA, 50 bp, Artificial Sequence
  Description of Artificial Sequence: Synthetic probe
cttaaaaaaactaaacraccaaacataactcraaacrtcctacctccccc

SEQ ID NO: 7708 - DNA, 50 bp, Artificial Sequence
  Description of Artificial Sequence: Synthetic probe
aaataaacaaacaacrcctcctttctaaaaactactccttcatcccaaac

SEQ ID NO: 7709 - DNA, 50 bp, Artificial Sequence
  Description of Artificial Sequence: Synthetic probe
taaaaatctaatacttctactaatataacaaacaataatacccacatacc

SEQ ID NO: 7710 - DNA, 50 bp, Artificial Sequence
  Description of Artificial Sequence: Synthetic probe
ccaataccaatccrtaacctattactaaactacrcaaaaaataaacaacc

SEQ ID NO: 7711 - DNA, 50 bp, Artificial Sequence
  Description of Artificial Sequence: Synthetic probe
atgagaatttaatgtttttgttgatgtgataggtagtgatgtttatatgt

SEQ ID NO: 7712 - DNA, 50 bp, Artificial Sequence
  Description of Artificial Sequence: Synthetic probe
aacctcaattcctacaatatttacacataataccacttaaataaatattc

SEQ ID NO: 7713 - DNA, 50 bp, Artificial Sequence
  Description of Artificial Sequence: Synthetic probe
tacaaacataaaccaccrcrctaaaccraaaaaatcttctttcaatcaac

SEQ ID NO: 7714 - DNA, 50 bp, Artificial Sequence
  Description of Artificial Sequence: Synthetic probe
ttaatttaaagttataaataatatttaagggaggtagagagtttggaaaa

SEQ ID NO: 7715 - DNA, 50 bp, Artificial Sequence
  Description of Artificial Sequence: Synthetic probe
aataaacraaattacctaataaatatctcccattcaaaaaaacccaaatc

SEQ ID NO: 7716 - DNA, 50 bp, Artificial Sequence
  Description of Artificial Sequence: Synthetic probe
atcraaacrcrcraactcctcccrattataaatatatctctccaaaaaac

SEQ ID NO: 7717 - DNA, 50 bp, Artificial Sequence
  Description of Artificial Sequence: Synthetic probe
tcaaaacacacaaactcctcccaattataaatatatctctccaaaaaaca

SEQ ID NO: 7718 - DNA, 50 bp, Artificial Sequence
  Description of Artificial Sequence: Synthetic probe
taccttttccaaaaacaacaaaaatactacacatttaataaaacacaaca

SEQ ID NO: 7719 - DNA, 50 bp, Artificial Sequence
  Description of Artificial Sequence: Synthetic probe
taaaatacraaaaatataactcaaaattccataactttaaacaaatccac

SEQ ID NO: 7720 - DNA, 50 bp, Artificial Sequence
  Description of Artificial Sequence: Synthetic probe
acaaccatttaactaaatcacattcctaaacctctcatattcctaaaaac

SEQ ID NO: 7721 - DNA, 50 bp, Artificial Sequence
  Description of Artificial Sequence: Synthetic probe
aatctaaaaacrcctaacatccaacttaaaacctaataaatcacctaatc

SEQ ID NO: 7722 - DNA, 50 bp, Artificial Sequence
  Description of Artificial Sequence: Synthetic probe
aaaacaccaaaaactaaaccaattaattccrcraaaacaaaaccaactcc

SEQ ID NO: 7723 - DNA, 50 bp, Artificial Sequence
  Description of Artificial Sequence: Synthetic probe
ggagatattagaagttggattagttggtttygygaaggtagaattaattt

SEQ ID NO: 7724 - DNA, 50 bp, Artificial Sequence
  Description of Artificial Sequence: Synthetic probe
ctaataccacctccttttcccttctaactaaattcctacccactacattc

SEQ ID NO: 7725 - DNA, 50 bp, Artificial Sequence
  Description of Artificial Sequence: Synthetic probe
aaacatatttaaaaaccaacaaactattaataaatctctacattctcatc

SEQ ID NO: 7726 - DNA, 50 bp, Artificial Sequence
  Description of Artificial Sequence: Synthetic probe
aaaacaattaaaaacacacttaaaaatcaaacratataattctacccctc

SEQ ID NO: 7727 - DNA, 50 bp, Artificial Sequence
  Description of Artificial Sequence: Synthetic probe
aygttgaaygtgtattaaattgaattgtttaaatatttataggtataggg

SEQ ID NO: 7728 - DNA, 50 bp, Artificial Sequence
  Description of Artificial Sequence: Synthetic probe
crttaaacrtacactaaactaaactactcaaacacctacaaacacaaaac

SEQ ID NO: 7729 - DNA, 50 bp, Artificial Sequence
  Description of Artificial Sequence: Synthetic probe
gggagtagttggaaatatatttaagagttaagygatgtggttttattttt

SEQ ID NO: 7730 - DNA, 50 bp, Artificial Sequence
  Description of Artificial Sequence: Synthetic probe
aacrtaaaccactttacccracctatatttttacrttttaataaatcccc

SEQ ID NO: 7731 - DNA, 50 bp, Artificial Sequence
  Description of Artificial Sequence: Synthetic probe
cctaaaaatacctcttactataacccatcrccaaataaacttttaaaaac

SEQ ID NO: 7732 - DNA, 50 bp, Artificial Sequence
  Description of Artificial Sequence: Synthetic probe
cactttatcattaatctatacccataaccrtctttttccattaaaccttc

SEQ ID NO: 7733 - DNA, 50 bp, Artificial Sequence
  Description of Artificial Sequence: Synthetic probe
ggttatttagtttagaggtattataattagggtgttttgttgtttagaga

SEQ ID NO: 7734 - DNA, 50 bp, Artificial Sequence
  Description of Artificial Sequence: Synthetic probe
actactcaatttaaaaatatcataattaaaatatcctattacccaaaaac

SEQ ID NO: 7735 - DNA, 50 bp, Artificial Sequence
  Description of Artificial Sequence: Synthetic probe
aacraacaaaaaaacttaaaaaaactaaacraccaaacataactcraaac

SEQ ID NO: 7736 - DNA, 50 bp, Artificial Sequence
  Description of Artificial Sequence: Synthetic probe
tatcrcaaataaactttaaactactactaacccacrcrcraaaactaaac

SEQ ID NO: 7737 - DNA, 50 bp, Artificial Sequence
  Description of Artificial Sequence: Synthetic probe
aatcactaaatatcactaacrcttaaaaacctacaaaaaacaatactaac

SEQ ID NO: 7738 - DNA, 50 bp, Artificial Sequence
  Description of Artificial Sequence: Synthetic probe
attttatattttacaaattatacacctatattatctcrtcttttaatcac

SEQ ID NO: 7739 - DNA, 50 bp, Artificial Sequence
  Description of Artificial Sequence: Synthetic probe
tttccacattcttataaacctcattatatatcccaaaaacaattaatatc

SEQ ID NO: 7740 - DNA, 50 bp, Artificial Sequence
  Description of Artificial Sequence: Synthetic probe
atacataatctctctataattccatttcctcacctataaattcrtataac

SEQ ID NO: 7741 - DNA, 50 bp, Artificial Sequence
  Description of Artificial Sequence: Synthetic probe
cattctaccatacttaaaaatctacrcaactaaaacattacaaacataac

SEQ ID NO: 7742 - DNA, 50 bp, Artificial Sequence
  Description of Artificial Sequence: Synthetic probe
tactctccccaactaaacataatatcaaaatatatacctacaaccctcac

SEQ ID NO: 7743 - DNA, 50 bp, Artificial Sequence
  Description of Artificial Sequence: Synthetic probe
tacaatacctacacaaaataataataaaaactctataaaaacatcaattc

SEQ ID NO: 7744 - DNA, 50 bp, Artificial Sequence
  Description of Artificial Sequence: Synthetic probe
tatyggtagatttagtttgatagtatttataggttgtyggaatggttatg

SEQ ID NO: 7745 - DNA, 50 bp, Artificial Sequence
  Description of Artificial Sequence: Synthetic probe
taacraaacaactctaaacracracttctactttcaatttcrtacaaaac

SEQ ID NO: 7746 - DNA, 50 bp, Artificial Sequence
  Description of Artificial Sequence: Synthetic probe
aatacaaatcctaaaatttttaatcaataaactctatcttcrtaaaaaac

SEQ ID NO: 7747 - DNA, 50 bp, Artificial Sequence
  Description of Artificial Sequence: Synthetic probe
agatgtagattttgaagtttttggttaataggttttgttttygtgagaga

SEQ ID NO: 7748 - DNA, 50 bp, Artificial Sequence
  Description of Artificial Sequence: Synthetic probe
actaaacacattataaaatttaaaaataattccccactccacaacctaac

SEQ ID NO: 7749 - DNA, 50 bp, Artificial Sequence
  Description of Artificial Sequence: Synthetic probe
aaaaaaattctaaacctcccacttcctaaacaaaacatttttctctaacc

SEQ ID NO: 7750 - DNA, 50 bp, Artificial Sequence
  Description of Artificial Sequence: Synthetic probe
atataactataataaaaacctaaatatccaaacctatttaccrattactc

SEQ ID NO: 7751 - DNA, 50 bp, Artificial Sequence
  Description of Artificial Sequence: Synthetic probe
tactccaaaaacctcaactaaataaaatcaaacaatatccrtcctcttac

SEQ ID NO: 7752 - DNA, 50 bp, Artificial Sequence
  Description of Artificial Sequence: Synthetic probe
actatactctcaactactcraaactaatccttaattttaactacrctcrc

SEQ ID NO: 7753 - DNA, 50 bp, Artificial Sequence
  Description of Artificial Sequence: Synthetic probe
atttttattggtataaggaaggtgggtagttagtatygttttgaagatag

SEQ ID NO: 7754 - DNA, 50 bp, Artificial Sequence
  Description of Artificial Sequence: Synthetic probe
tccccattaacacaaaaaaaataaacaaccaataccrccttaaaaacaac

SEQ ID NO: 7755 - DNA, 50 bp, Artificial Sequence
  Description of Artificial Sequence: Synthetic probe
taaatatttaagtttaggggtttataggagggtatttttgttgtaggtat

SEQ ID NO: 7756 - DNA, 50 bp, Artificial Sequence
  Description of Artificial Sequence: Synthetic probe
aaacatttaaactcaaaaactcacaaaaaaacatttttattacaaacacc

SEQ ID NO: 7757 - DNA, 50 bp, Artificial Sequence
  Description of Artificial Sequence: Synthetic probe
tataaacrcraaccaaaaaataacrtataaaaacttcttaacctatcccc

SEQ ID NO: 7758 - DNA, 50 bp, Artificial Sequence
  Description of Artificial Sequence: Synthetic probe
rcccrtttccrtataaacccraaactaccacttactaactaaaaaaaacc

SEQ ID NO: 7759 - DNA, 50 bp, Artificial Sequence
  Description of Artificial Sequence: Synthetic probe
aaccctaaacaacraacacaataattaaaattcccrcaactacaaatccc

SEQ ID NO: 7760 - DNA, 50 bp, Artificial Sequence
  Description of Artificial Sequence: Synthetic probe
gagttttgagtagygaatatagtaattgggattttygtaattgtaaattt

SEQ ID NO: 7761 - DNA, 50 bp, Artificial Sequence
  Description of Artificial Sequence: Synthetic probe
aatactaacrtccaaataacccraaaaatcctctaaaaatacaaacccrc

SEQ ID NO: 7762 - DNA, 50 bp, Artificial Sequence
  Description of Artificial Sequence: Synthetic probe
racatcractaatcaaaaccaaactcrataaaactttatctccctaccrc

SEQ ID NO: 7763 - DNA, 50 bp, Artificial Sequence
  Description of Artificial Sequence: Synthetic probe
cttttaaaaaatcaatccctccttaattacccrcctcaactaaaaccrcc

SEQ ID NO: 7764 - DNA, 50 bp, Artificial Sequence
  Description of Artificial Sequence: Synthetic probe
atctaacatctaataatacctatccccatctccatacctaaactaacttc

SEQ ID NO: 7765 - DNA, 50 bp, Artificial Sequence
  Description of Artificial Sequence: Synthetic probe
tatacataccctccctactacactacaaattcttaaataataaaatacac

SEQ ID NO: 7766 - DNA, 50 bp, Artificial Sequence
  Description of Artificial Sequence: Synthetic probe
ttgaatttttgttttatgtgagttattgttggtaaagaggatgaataaag

SEQ ID NO: 7767 - DNA, 50 bp, Artificial Sequence
  Description of Artificial Sequence: Synthetic probe
ttatattaatttactatccttcrcatacattataactatttcccctcctc

SEQ ID NO: 7768 - DNA, 50 bp, Artificial Sequence
  Description of Artificial Sequence: Synthetic probe
caaacrtctaactccrcaacaaaacacraaatttacattccccaaaaaac

SEQ ID NO: 7769 - DNA, 50 bp, Artificial Sequence
  Description of Artificial Sequence: Synthetic probe
aactcctccttttctcacraattaaaaacrattatcaaatccctttcacc

SEQ ID NO: 7770 - DNA, 50 bp, Artificial Sequence
  Description of Artificial Sequence: Synthetic probe
aactaatattacaaaatacctacctactactataaaattttactttatac

SEQ ID NO: 7771 - DNA, 50 bp, Artificial Sequence
  Description of Artificial Sequence: Synthetic probe
ctcatatctcctaataacaaacataacctcactcaacttctccaaaattc

SEQ ID NO: 7772 - DNA, 50 bp, Artificial Sequence
  Description of Artificial Sequence: Synthetic probe
aactaaaccatcraaaaactttcaattttatttccttacctacaaaaaac

SEQ ID NO: 7773 - DNA, 50 bp, Artificial Sequence
  Description of Artificial Sequence: Synthetic probe
ttttttagatagtttttgggttaagatttagggagatattgagatagagt

SEQ ID NO: 7774 - DNA, 50 bp, Artificial Sequence
  Description of Artificial Sequence: Synthetic probe
ctaaatctattcatcaaaaaccctctaaaccaataacaaaaaaacaattc

SEQ ID NO: 7775 - DNA, 50 bp, Artificial Sequence
  Description of Artificial Sequence: Synthetic probe
tttggatttgtttattaaaagttttttgagttaatggtaagggagtaatt

SEQ ID NO: 7776 - DNA, 50 bp, Artificial Sequence
  Description of Artificial Sequence: Synthetic probe
atttacaactctctaaatttcctcctaccrttttcaaacttataacctcc

SEQ ID NO: 7777 - DNA, 50 bp, Artificial Sequence
  Description of Artificial Sequence: Synthetic probe
tctttcacraccraaaaaaaactaacaatctaaaaccaaatccrcctccc

SEQ ID NO: 7778 - DNA, 50 bp, Artificial Sequence
  Description of Artificial Sequence: Synthetic probe
aaccttacctaaacraaaacrtctacrttaaacctaaccaatacraatac

SEQ ID NO: 7779 - DNA, 50 bp, Artificial Sequence
  Description of Artificial Sequence: Synthetic probe
ataaaacraactctaaaaatcrcataaaaaaactataatatcctaaatcc

SEQ ID NO: 7780 - DNA, 50 bp, Artificial Sequence
  Description of Artificial Sequence: Synthetic probe
tctacaataacccttcaactccaacctcrattactacrtctaaaataacc

SEQ ID NO: 7781 - DNA, 50 bp, Artificial Sequence
  Description of Artificial Sequence: Synthetic probe
aattacccctcrccataacctacaaaatctcraaaaaattaccattaccc

SEQ ID NO: 7782 - DNA, 50 bp, Artificial Sequence
  Description of Artificial Sequence: Synthetic probe
tagttgtttttygttatggtttgtagagtttygggaaagttgttattgtt

SEQ ID NO: 7783 - DNA, 50 bp, Artificial Sequence
  Description of Artificial Sequence: Synthetic probe
gtygtggtaagttatgtggtttttgtaggtattttggttgtagtagttat

SEQ ID NO: 7784 - DNA, 50 bp, Artificial Sequence
  Description of Artificial Sequence: Synthetic probe
ccttcctactactaaacrtaatacaatcaataaaaacccaaatctatcac

SEQ ID NO: 7785 - DNA, 50 bp, Artificial Sequence
  Description of Artificial Sequence: Synthetic probe
rataccaaaaaaaataactaaaacctactctaaacaaacacaaacratac

SEQ ID NO: 7786 - DNA, 50 bp, Artificial Sequence
  Description of Artificial Sequence: Synthetic probe
ttttttttgttgttggaygtgatgtagttaatggaagtttaggtttgtta

SEQ ID NO: 7787 - DNA, 50 bp, Artificial Sequence
  Description of Artificial Sequence: Synthetic probe
caacaaataacaatttcraattcacacraaaacraacrtaccatttccrc

SEQ ID NO: 7788 - DNA, 50 bp, Artificial Sequence
  Description of Artificial Sequence: Synthetic probe
aatcttcctatttatcaaaaaattctaaaaaaattaatttcacccccctc

SEQ ID NO: 7789 - DNA, 50 bp, Artificial Sequence
  Description of Artificial Sequence: Synthetic probe
ttacttcctaaaaacctaaaacaattctatcttcttaaaaataaacttcc

SEQ ID NO: 7790 - DNA, 50 bp, Artificial Sequence
  Description of Artificial Sequence: Synthetic probe
aaacrattcaaaaaaccaaactccaatttcaaacaaatctctccaaaaac

SEQ ID NO: 7791 - DNA, 50 bp, Artificial Sequence
  Description of Artificial Sequence: Synthetic probe
cttaataaaaattaataaaactccataaaactattatccaaaaatcctac

SEQ ID NO: 7792 - DNA, 50 bp, Artificial Sequence
  Description of Artificial Sequence: Synthetic probe
tcaaaaacaatctcattttatttctaccactattcaaaatcccaccttac

SEQ ID NO: 7793 - DNA, 50 bp, Artificial Sequence
  Description of Artificial Sequence: Synthetic probe
ccaaacrcaattctcraatctataactccraccraaaattaaatctaaac

SEQ ID NO: 7794 - DNA, 50 bp, Artificial Sequence
  Description of Artificial Sequence: Synthetic probe
tcraactctaacctcacaacaacatctaaaaataaatatctacratttcc

SEQ ID NO: 7795 - DNA, 50 bp, Artificial Sequence
  Description of Artificial Sequence: Synthetic probe
actatcccccaaataacacattacaaatcaaaaccccctccaaactaaac

SEQ ID NO: 7796 - DNA, 50 bp, Artificial Sequence
  Description of Artificial Sequence: Synthetic probe
tttatttttatcacaaaaactattaaaaaatttaactcattatttcaacc

SEQ ID NO: 7797 - DNA, 50 bp, Artificial Sequence
  Description of Artificial Sequence: Synthetic probe
ccatatatccccttcccaccaaatattaaaatactcccrataacttactc

SEQ ID NO: 7798 - DNA, 50 bp, Artificial Sequence
  Description of Artificial Sequence: Synthetic probe
atatggttatgtttgagattataaattttggatygttggttaaattgtga

SEQ ID NO: 7799 - DNA, 50 bp, Artificial Sequence
  Description of Artificial Sequence: Synthetic probe
tataaccatacttaaaatcataaaccctaaaccrctaatcaaactataac

SEQ ID NO: 7800 - DNA, 50 bp, Artificial Sequence
  Description of Artificial Sequence: Synthetic probe
cacataccaacaaaatcttatatctcctatcraacttcacctataaaaac

SEQ ID NO: 7801 - DNA, 50 bp, Artificial Sequence
  Description of Artificial Sequence: Synthetic probe
aaaaactaaaaacraataatcatacaatcatacaaataatcraaaaacac

SEQ ID NO: 7802 - DNA, 50 bp, Artificial Sequence
  Description of Artificial Sequence: Synthetic probe
acctaaactattaaaacttatccccttaataaccraacaccataactcac

SEQ ID NO: 7803 - DNA, 50 bp, Artificial Sequence
  Description of Artificial Sequence: Synthetic probe
aacaattaactaccaaatttctaaatatcttaatcctttataattaatcc

SEQ ID NO: 7804 - DNA, 50 bp, Artificial Sequence
  Description of Artificial Sequence: Synthetic probe
gatatatggagggtataaggaaagatgttaagatagttatagtaagyggt

SEQ ID NO: 7805 - DNA, 50 bp, Artificial Sequence
  Description of Artificial Sequence: Synthetic probe
acaacraatcctacaaccaaccaatatacaaaccctacctaaccttatac

SEQ ID NO: 7806 - DNA, 50 bp, Artificial Sequence
  Description of Artificial Sequence: Synthetic probe
accaaaatatttactaaaactataaactctccaacccraaaaaaatcrcc

SEQ ID NO: 7807 - DNA, 50 bp, Artificial Sequence
  Description of Artificial Sequence: Synthetic probe
taaaaacttacaaaaaatactctctaaccatcttaaattcaataaattcc

SEQ ID NO: 7808 - DNA, 50 bp, Artificial Sequence
  Description of Artificial Sequence: Synthetic probe
crtaaaattctccaaaacaaactaaacracataaaccctataatcttttc

SEQ ID NO: 7809 - DNA, 50 bp, Artificial Sequence
  Description of Artificial Sequence: Synthetic probe
tatcatcaaaaccaaataaatctcacccaattaaaacaaaaaaatccccc

SEQ ID NO: 7810 - DNA, 50 bp, Artificial Sequence
  Description of Artificial Sequence: Synthetic probe
cttataaaacraaaatatcaatcaaatacttaaccaataataaaaaatcc

SEQ ID NO: 7811 - DNA, 50 bp, Artificial Sequence
  Description of Artificial Sequence: Synthetic probe
tacccctctctcrtttttcaatactaaatctcttacaaaattacaataac

SEQ ID NO: 7812 - DNA, 50 bp, Artificial Sequence
  Description of Artificial Sequence: Synthetic probe
ttaatgaagttagtggttttttaattygttgattttattgattaggtggt

SEQ ID NO: 7813 - DNA, 50 bp, Artificial Sequence
  Description of Artificial Sequence: Synthetic probe
taataaaatcaataatttttcaattcrctaatttcactaaccaaataacc

SEQ ID NO: 7814 - DNA, 50 bp, Artificial Sequence
  Description of Artificial Sequence: Synthetic probe
taaaaccctctacataaccctatcttcrttaaaaaaaaatccccatactc

SEQ ID NO: 7815 - DNA, 50 bp, Artificial Sequence
  Description of Artificial Sequence: Synthetic probe
ttcccaacctaactaatttacaacaatcacctataaatactaattaaaac

SEQ ID NO: 7816 - DNA, 50 bp, Artificial Sequence
  Description of Artificial Sequence: Synthetic probe
atattttttattatgattaaatggagtaatgtatgtgatagtgggatttg

SEQ ID NO: 7817 - DNA, 50 bp, Artificial Sequence
  Description of Artificial Sequence: Synthetic probe
aaacracaaaaacataactcctaaaaacrcraaacttaaacacraacctc

SEQ ID NO: 7818 - DNA, 50 bp, Artificial Sequence
  Description of Artificial Sequence: Synthetic probe
tatacctacctcataattccaaaaaaaaatccaattaactatccctatac

SEQ ID NO: 7819 - DNA, 50 bp, Artificial Sequence
  Description of Artificial Sequence: Synthetic probe
aaaatacratacaaatcractaaacrattaaaacrcaaaatttacacrac

SEQ ID NO: 7820 - DNA, 50 bp, Artificial Sequence
  Description of Artificial Sequence: Synthetic probe
actccacctttctaaaataaataacctaataaaatccaaacttaaatctc

SEQ ID NO: 7821 - DNA, 50 bp, Artificial Sequence
  Description of Artificial Sequence: Synthetic probe
taatttttagaatatagggtattatggtgttygttgtttaagtaaagatt

SEQ ID NO: 7822 - DNA, 50 bp, Artificial Sequence
  Description of Artificial Sequence: Synthetic probe
aatccccaaaacataaaatatcataatacccrttacccaaataaaaaccc

SEQ ID NO: 7823 - DNA, 50 bp, Artificial Sequence
  Description of Artificial Sequence: Synthetic probe
aaaaacaaaaatttataatcacttaacattaccattcrcttaccaaacac

SEQ ID NO: 7824 - DNA, 50 bp, Artificial Sequence
  Description of Artificial Sequence: Synthetic probe
rataaaaattaaaccrcataaaaataaaaaacaaccacttcaaataatcc

SEQ ID NO: 7825 - DNA, 50 bp, Artificial Sequence
  Description of Artificial Sequence: Synthetic probe
ggggaatagaggtttatggttatttagtattgttattygtttgttagata

SEQ ID NO: 7826 - DNA, 50 bp, Artificial Sequence
  Description of Artificial Sequence: Synthetic probe
tcctttccaaaatatctccrtttacaaacttactcttccattacatctac

SEQ ID NO: 7827 - DNA, 50 bp, Artificial Sequence
  Description of Artificial Sequence: Synthetic probe
aactaaacrtacaaaaataaaccacacrcaacccctactttctaaaaacc

SEQ ID NO: 7828 - DNA, 50 bp, Artificial Sequence
  Description of Artificial Sequence: Synthetic probe
tctaaacrataaacctaaaccrctaaaccrtactctaactaaaaacctac

SEQ ID NO: 7829 - DNA, 50 bp, Artificial Sequence
  Description of Artificial Sequence: Synthetic probe
aaaaaaaccaacccctccacacctataaatatttctcatcaaataaaaca

SEQ ID NO: 7830 - DNA, 50 bp, Artificial Sequence
  Description of Artificial Sequence: Synthetic probe
caaaatacccacrccaaaaatctaactatccaactccaaacraaccctac

SEQ ID NO: 7831 - DNA, 50 bp, Artificial Sequence
  Description of Artificial Sequence: Synthetic probe
aaaaaaaactatcttattaaaaaataaatatctccracaacrtaaaaccc
